United States Patent Application Publication US 2026/0258423 A1 - sequence listing, part 16

SEQ ID NO: 167803 - DNA, 46709983 bp, Homo sapiens (residues 15,013,927-16,682,140 of 46,709,983)
  source 1..46709983: mol_type = genomic DNA
ctattgtaggatttgtattaactgtccattttctctggtttttgataaatcgaattaagtgttgtcaacaaaaatactatttcttctttcaagctttccaattcctctctccagaagtaatctacacactgaattctcaagaatatttttctccatttctcttacagcatttaacctcttttactgtttgattacattatttatctacatttattctttccatataagttccttaaaggaaggattgtagctctttcattttttaaaccacattgcctgatgaagtaacttgcacagatgaagtacataatacatattttgaattataagctaatttataactgagaaagaattgtctgaaatatattaaagtcataatgattaagccttaagaactcaggaaaaaaatattctcaccgtctgtctccaagctctgagcctctgctttctgagaaagaaaattgagaaggctgttgaaaagtagctctgatgtcatccggagtcttcagattccctgtcctccttcagtcaagtgtgcatcttaacaagagggaaaagatagtttggcatctattccaaaccagattctggaataccttttgatcaagttcaacttatcccattaccttttcttgttcaagttcaatgcaaaagtagtcatttgacagaaaaatatcaattgtttatgaatgctggttcattaacagaaagcaatagatctctgctttctaggtaataatcgataaaagtagctgcttcaacaaaataagctgtgaaaaaggtttatagttgctaggatgtgtttattaacctttgttaatttcaaatttcttagcgtgctgtgctaaattaattaatttacatacaaaaaattataaatcctcctaaacgtgtatttcttaaaaaaaaaaaaaagaatagctatagttttcttatatggaactttttcagtttcaaaataccaagtatgtaatctttgcagcaaaaaaattggtaataaatatcaaatgccctatatatccatgaaaagatttacacaacaatgcccaaagtagatttatttttaatagtcaaaaactggaaacaactgaaatgcccatcaataggtgaatgaatcatatggtatatccatacaatataattttactactcagtatcaaaacagaatacacacaacacatacggaaaataaatatggatgaatctcaaaataattaccctgagtgcaagaagccagacaaaaagaaacatattttgtgtgattccatttggataacattccagaaaacgcaaattcatctattgtgaaagaaaatagatcagtgaggttgcctggggatgaaggatgcccaagggagggattacaaagaaatatcatcttaatggtgatgatggtttcacaggtgtacacacatgtcaaaacttgtcagattgttccttaaatatgtgcagtttattcatcaattatacctcgataaaactgtaacaaaaattaaatgccttaacatgttatatgtccgttgatgcagcaattccatgtctaagatttatcctaattaaaaaaatcatggaggataggtgtaaatatttagccataaggatgttcaaaatacatattattatatttgtgcagtacattgtatacagccataaaacgtcaaaatgaaaaaattagaaatagttaaataaactacagtatattacatcatggaatattatgtagtcattaaaatattatacaagaaaattaaattatatgaaattatatactatataagtgataaaaacaggaaacaacattatttcagcataattgaatttttgttttaaacaaaagtaaatgcagtaattatttctgcatttagaggtaattgttattttttctttttgctgatttgcattttctaatttctctacagtaaatacatacatattatttttctaacaaacaccacaaataaaatgatgcaaataggaaaaaatctaaaattttccactccctaatacaagtataaaactcctaagaggcagtgcacaatacagatgtagttctgagctatcacacggccaccagcagcaccctactaaatagctgtgggaaagagacaggtctgacacataaatgggagcatcattaagtgagtaatgctttaccagttacaaaatgctatcatggacatgactgtatttgattttcacaactcggtgaaatgagcagagattccatttcatagaggagcaacagatactgagcagggctggttaagtcatatgccccaaattatagatcttggactcaattaaatcttgactataaattcagataggaattctaagaagagtaggaaacaatcacttgccctgattatatatacctagaaggatgtgattcacacatcaacttaacaataaccatatgtgtaattacatgagtactcctattagaatgtggtagggacctcgggaatttctgaagtctccaatccccagtctctgaagtaatactcaaggcacgcccatcttcccgttatcaacattatctaccaactcactgaaattccagtagaatttaactgttcagttttcaattaccttttttccttcttgaaaaaagattataaccttttattttaaagttggaacaagaaagtacccataactatatttgagaatgctggccgggcgcagtggctcacacctgtaatcccagcactttgggaagccgaaatgggcagatcatgaggtctggagatcgagaccatcctggctaacaaggtaaaaccccatttctactaaaaatataaaaaaattagctgggtgtggtggtgggcacctgtagtcccagctactcgggaggctgaggcaggagaatggtgtgaacctgggaggcagagcttgcagtgagccaagatcgcgccactgcactccagcctgggcgacagagcgagactccgtcaaagaaagaaagaaggaaagaaggaaggaaagaaagagagagagagagaaagaaagaaagaaaagaagaaagacaagaaagaaagaaagaaaagagaaagaaagaaaagaaagaaaaagaaaagaatgaaggaaggaaggaaggaaggaaagagaatgctgcaactagtaatctataaattgattactggaactttaaaatgtgaacttgtgggctaaatctttttttggtctgtgtatatagataagaaaccctacaaactggcatattctataaagaaaaccaccaactcctgagaagggtaaaaggaaatatctctagaggaacattactattatcattattatttttatttttagagacgaggatctcgctatgttgctcaggctggtctcaaactcctgggttcaaatgatcctcccgactcaacctcccaagtagctggaactgcaggtgtgcaccacggtgcccaacttagaggaacattattaatgaactggtcattatctgttgatgacaccatgaggaatccttacagctactactcttaccaacactcctagaactaagagacttaacaggtaatgataactatagtttaatgagcaattactatgtctcaaacataacaataagccttttacagatataatcttaaaaaaaccctgtaaggtgattattattatccccagtttgtagatgaggaaactgggtttaagttaccccaaatcacaaagtcaataagagactgaggtggaattcaaatcccagtattttggaaaaagacagggccttgacagttctctggaaaataaattctgatttttccctactactgttcatctacaatggtctcaattcaggtaatgcaaaatacttggtactagcatatgaacttaatgagcctacattttccatgtaaaaagttaaaagtattccgagcccacaatgtgtatttgatattttgtcacattctagaattgtttatgttaatggttggtctctactaagacactctccttctgagacaaatatatgaccacacaaaagataaattaaaagaatatttaaataaaaccaacaaaagataacacaaaataaactactctaacattaatacttaaagttttcctatattaataagtgagtaaattagccttcagttcaagtcagtgaaactgaatatgccagatgtgttctgaatcatgacaaaagaagcatgtctaatgaataagaaaattttaaataacttcatcataattatattatgaaatattatacaatctttaaaatggatgttttcaaagatccatttatttaataatgtggtaaaattatcacaatacaatgctaagaaagcaagatactattcatctgagttgaacaaattgctaaacaaattagaaggctagacactatgctaggtgttggaattacaacatgaataagacgaacacagttcccatgggaaagagacaggaaagaagcaaacagaaaataaaataattgaagatttcaaacaaagcaagaggtagagaggaagctattttacataaagtgataaggaaaagcaaaagcttctctgagaaaatgacatttaagctgagaaggccctagtcatacaaagaataaagtgaagagaatttccaataaaagaaatagtgtatgcaaaggacgtgcctgcttaaggaactgagagatgaccaaagtaggtagtaatgagcaaggaaaaaaatggtaacaaattaggtcagagatgtgagcataaaggatgatctcaaatttgttttttaatgtgttaccccacacacatatacacacaccatactgaagggacggagaacacaatgataacagtgatattctagatggtaggaaaaggagttggggttattttcccttaatatttccacatgctccaaaataggctgcataaacattacaatgagaaaaaatatggctagaacttccagtctagtgttgaaaagaagtggtgagcgcaaacattcatgctttgtccccattttacggagaaaaaattccaccttccactattaattattatacagctgtagtatataatacagctgctattccctcttccctatgtgtagtttgtgagttttgtttgcttttatcactgatgtgttggattttgtcaaatgatttttcctgtatctatcgagataatcatgtgagtttttactcttttatgtgggtttttagtcttttagtctattaataatatattattatatttataatatatataattactatattaattgtttcagtgttaaaacaatctttcctttctaagataattgcctacaactaatatcatactaatggtgaaagactgaatgctttccccacctaagatctgaagaagacaaggatatctgatgtctactcagtgcaacaaatataaagatagatagactgaaaaagaagtcaaaattatccttatatgcaggtaacatgatcttgcttgccaataactctaaggactctacaagaaacccaaaataattaataaaaaaaagttcagaaaggtttatgacaagatccacaaacaactgcatttcttttttttttttttttttttttttttttttttttttgagacacagtctcactctgtcgcccaagctggagtgcaatgatgcagtcttggctcactgcaacctctgcctcccaggttcaagcaactctcctgcctcagcctcccaagtagctgggattacaggcatgcaccaccatgcctggctaattttgtatttttagtagagacgggatttcactatgttggtcaggctggtcttgaactcctgacctcaggtgatccacccacctagaccttccaaagtgctgggatgacaggcataagccaccacacctggccattaaatttattcttaagctttattctttttgttactcttgtggctgaatggaatttatttttggatggtttgttgccagtatataagaaacgcagccaggcacggtggctcacgcctgcaattccagcactttgggaagcagaggcaggagtaaaacatgtgcactcaaaactacaaaacactgttgagggaaattaaagaagacttgtttattggaacaaagattcagttgattgaaagatccaatattactaagacgtcaattctccctacactgatctacctaaatgccatcgtaatctttttctagaaattggtcctaaaatatatatgaaagtataaaataccaagaatagtgaaacaactctgaaaaagtatgaagctgcaggacttaaacttatctaatctcaaaacatactataaatctatatggtaaccaacagtgttggtcctgctataaagatacacatatagacaatggaacagaatagagtccagaataaactcccattcatagtcatttgattttcgacaaatatgccactgcaattaaaataatagtctttttaatacatggtgcggtacagttagatatccatatgtgaaaataaataattaagtgtaaacctgtatctctcaacatacaaaaataactaaaaatggattatagtctgaattgtaaaaattaaaacacaacttctagaagaaggaataggataaactcttatgaccttaagttacagaaatattccttaaataagaaaacaaaagcacaatccatttaaaaaaattaaaaatggaatgtcatcaaattgaaagataatccacagaatggaagaaaatatatgcaaatcatataactgatgaagatatactatacagcatatattaaaaccctttgaagtcagcaataagataaactaaccaaattgtttttaatggactaaagatttaaaggtacttcaccaaagaagacatgtgaatgtttggtaaacacataaaaagatgctcattgtcatccactaaagacatgaaatactagtaaaatcacaatgagatcacattacacactcactagaatagctatattaaaaaaaaaaaagactgaaaaaactcaaaggttggggaggacaggaagaaactgaaactctcctccattgctggtgagaatgtaaaaatggcataaccacttgaaaaacagtttggtggtttttcaaaaagttaaacatacatgaatgtataaccttgcaatgacccactaattgtacactggagtacctaagagaaatgaaaaatatatgtccacaaaaaatctgtctacaaatggtgatatcagcatcaatcataataaccaaaaactgtaaacaaaacaaatgcccatcaactattaaaggcaagcataaagtgtaaccaacaaaaaaagggaatgaactaatgattcacgtcaccaaggatgaacctcagaaacttaatgcttagtgaaagaagctaaatacgaaagatatctatattgtatgattccaaaaagatatctatattgtatgattccatttatatatgaaatgtcttaaaaagctgaactgtatgtagagaaagcagatcacctcctggggcaggagaggagaacagagattggaaatgggcatgaaagactctgtgaagacatgaaaatgtcctaacgccggactgtggtgatggctgcaacatctgagtgcattgactcaaaaccttccaactgaacacttgcagtggatgaattgctggatacatgtaaattatacctaaataaagccatgaaaaacaaaaataaaaatgatatattacatacaaaatcataaatttatttaaaatgagtccgatgtgctgacaaaggtctcatatccagagtttacaaagagtttaaataaatttacaagaaaaaaaacattaaaaggtgaacaaagacatgaacagacagttctaaaaagaagacattcgtgcggccagcaaatatagatataaaagctcaacatcactgatcattagagaaatgcaaatcaaaaccataatgagataaccatctcatgcctgtcagaatggtgattattaaagagtcagaaaacaacagatgctggcaaggttgtggagaaaaaagaatactttacattgctggtgggagtgtaaattagttcaaccattgtggaagacagcgtggcaagtcctcaaagacctagaggcagaaataacatttgacccagcaatcccattactgggtatacacctgaaggattataaatcactctatcataaagacacatgcacatgtatgttcactgcagcactattcacaacagccacgacatgaaatcaacccaaatgcccatcagtgatagactggataaagaaaatgtggtacatatataccatggaatactatgcagccataaaaaggaatgagatcatgtcctttgcagggacatggatagaagccattatcctcagcaaactaacgcggaacagaaaaccaagcactgtatgttgtcacttaaaagtgggagctgaatgatgagaatacatggacacatttctggggaacaatacacactgggcctgttgggtgggaggtgtggggggagggagagcatcaggaagaatagctaattgatgctgggcttagtatctaagtgatgggttgatctatgcagtaaaccacatggcatatgtttacctatgtaaaaaacttgcgcatcctgcacatgtaccccagaacttaaaataaaagttgaagaaaaaaatgagtctgatgtaaaatacactgccacttctctcattattttaaataacaatcatactttaagataaacctaatgtattacaattactctttggagaatgcaaaagtagaattaagatgactatccaccttcttcatacactactggtgggaatgtaaaatgcagtgtagccactaaggggaacagacagttccttaaaaagcaacatcaagttacgacgtgacccaggaattccattcctgtgtatatacagaagggaaataaaaacctgatgtccatccactgataagtagataaaatgtgataaatccatacagtgaagtattatttagtcacaaaaaggaatgaagtgctgacacatgctacaacatagtcaaactttattacgctcagtgaaagaagccaatcactaaaaatcacgtgatcccatttctatggaatgtacagaataggcaaattaatctagacagaaggatcggtggttgtctagggctggggtgggaagggatggaaatggagagtgacagctaacaggtgtggagctccttttaagatcatgaaactgttaaaaaaagactgtggtgttggttacacacctatgtgaacataaaaactacggaactgaacactttaaacaggtgaatttatagtatgtaaattatatctcagtaaagctataaaaatgactattcacctaatacttattaaaacatcaaaagtaatttcagggtaaaaacctagatctctaatcttacttgtgtgcttttgaagttatgtcacatttatcagaacagtttgttaatattcaattaattctggctaaatattagaatactttttttaaataaaatcaactgtatttttgtacaccagtaacaaacagaaaacaacatttaaaaaatatccaacagcaaagcatacctaggaagaaaagtaacttgtaaatactgcatgctcaatataaataaaatatattggaaggcattaacaacgaaacctaaataatccaaataaatggaatgacacaccatgtttattatataaatactcagtatcgtaaaatgacaattcttcccaaattaaacaaatgcctttaatgcaatgcctatcaaaatgtaaaaggtttaataagttgattctaaaatttgcatggagcagcaaaagcccatgaaagagaaaaaatcctaccaccaaaagaaaatagtaggaaacttgccttgccagataccaaaatgtatcataaagttctaataattaagctagtgcgctcctggaaaggagaaaaacaaattgattgctggagaagtagatcatcacacagagaaaatatttgacaaaagttacactttagatctccagagaacggagacatcattcaatagtgttgaaacaactggttacccatcgtggaggcaaaagtggattcctgatgtctaacatataaacaataaattccagagggattaaaggtttaaatagagaaggcatgtctttaatatttttaaaacaaaatataagaggatatctttatgatctcatagtaggaaacgtttccttaagacacagaaaggttaactatatgcaaagcgttaagattaataaattcaaatgcattaaaattgaaaacttcattcatcaaaaatacaacagaagatgaaaaatgaacaacaccataaaatacactgccaaaaacattgggggttggtgtgatggctcacgcctataatcccagcactttgggaggctaaggtgggtggatcatttgaggtcaggagttcgagaccagcctggccaacatggtgaaaccccgtctctactaaaatacaaaaattagctgggtgtggtggcagtcacctgtaatcccagctactagggaggctgaagcaggagaattgcttgaacccaggaggcggaggttgcagtgagctgagaacgcatcactgcactccagcctgggcgacactctgtctcatatacacacacacacaaaactttggtatccagagtgtgtgtgtgtgtgtgtgtgtgtgtgtgtctgtgtgtgtgtgtcctataacattttaattaaaaatgggcaaaatagagagggggtagccctaataagaggagtcagagagctcaagcaggatgaggttggtgtcactgtggagtggaagaaatgatgtggtatggggaattcgagcccaagctctagatctgtattgttcttgttattgtatgtgttattttaaaattttaaaaaatttaagacataaaagtatttaatgtaaagttttaagtatataatgtacgaaaggtatgaactcgcatttcacgaaagaatacactaatggtgaataatcacatgaaaagatgtctaaccttattgtcaatcacagaaaagcaaatcaagaccaataagatgccattttgcatccaataaattaagaaaagggtggtttgaggtgagcaggatgacagagaagtccttgcacaggagtggtccagcactgggtatcaatgcccaagttggagcagaagggcatccacaaaaagatgcactgtggtgtgcaatgtagaaatcgatgtggggtgagaacggcttccacataaaggggctttgaggctcaagtaaaactaaggggcagggtgagggacaggagaaatggcagattgactacatacagggagaatgatcaaataaagtaacactaaggatcatggtagtcaggtttctcactataagaggaggtacaaaaagggaaggaaatataattgaagcctataggattggaatgaaattagagatatcagtatgatcaagggatgacatgtcaaaaagatactgaagggggtactgctggcaaaatcagggacaagatgggcaccaaaataagttacaatagtaacggattacagctcactgaataaaatacgggctcataagcacacactgatacaaataaattaactaaaactgtgatcaggaaagggattttacatagtttcaaagcacctgcatgcaaaataattattaattacagagggaaaatgagtaatttcacagtagatgaaattagcagacaccatcttaatcaagtaatcccagtgaaaagtcaacagtaatgggtcaaaatgaaattgtatgccaccgcagaggatgcaaagagaagacacagtatcacttctgtgatattcctgctcaatattcataacatggatctaatcatgaggaaacagaagacaaccctaaaggaaaagatattctacataattacgggccgacatggtcttctaacatgccagtgtctttaaagtcaaagactgaagaactgttccagactgtgggagaccaaaaagatgagacaataaaatgcaaagtgtgattctaaatggaatccttttgctgaaaaggacattatcgggacaacctggaaacttgaatgagctctgacgattagatagtagtgatgatcaatgattttgatggttttgttgtggtttccaggacaaggtcttgtttctttctgggaaacacacacttgtttattcatgggaaataagtcaacagaggaaaaaagttccactgtattgtacgtgtaacttttctgtatgtgttactttaaaattaaaaatatgtagaatacaaatgcataaaaaaacagttttgagtacataatgggcataggacataataagaatttcataagatagtacaccaatgatgaaaaaacacatgaaaagatgttcagcctcattcgttatcacacagaaaagtaaatcaagatcataatacgatgccactgtatctactaatttggaaaaagttaaaaagtctgacaattcttagatctgacaatgatgtagctcaacagaaacttctgatatattattaatgaaatgtaaactggtctgataacattggaaacaacttcatattatttcatataattgagcattctttacatatctactcttgggtatataccctagagtcttgcacatcttcttcagaacacatataaaagaacgttgacatcagcaatgcttataatagtcatacatatgtgtgtaaatataagtacacctatatatgtatgtaagtatatcaacataggtatatcaaaaacaaaacaaaacaaaacaataacaaacaaacgaaaggacccagcaaccatccaaatgtccacacagaggggaagaaataaatacacacaatggaatattgcccaggagtggaaataaatgaactatacctacatacagcagtataaataaatttcaaaaaaccaatataagttgaaaaaacaagtctcataactgtacatattaaataacttaaagagtgtaactgggttgtttgcaactaaatgtataaatgcttgaggggatggacacctcattcttcatgatgtgcttacttcacattgcatgcctgtatcaaaacatctctgtaccccatgaatatatacacttgtacccacaaaaactaaattaaaaaaaaatttgaaacagcaagtatccgaagacttcatacagaatgctaccattttcgcaaaacaaaaacataaagtaacatattacttaaagattaatgtaaaaaccagtattatttaaaaggcagtaaatgattaacacaaaattgaagaaagcggttgcaagacaccaggggcaaggagagcaacatatcgacagattcagctgtggtagttaagtctgattctatgctcgatggtaggttcttggcagatcactgtcatattgtgcctcataattcaaatacattcctgtttataccaagggttacttacataacagaaaacaagtggctatattgtggcaaatcagagctttgacaagtatcttgtttaggtaagcatcttaataattttcacacatgaacaaatgttaactgttaggtgacagattttctttattctccttgttagaaacaaaaccaaaggagtatataaagagatacactcaaaagaattgaaaaactgactggcagataaaaacttatagcttggtcaatcaaagaatgaggctaattcatatctaccaccactttggtctcaaataaagctaacataaatgcttgcttacttaattactgcgaacttcagaactgtctgatgaaagatgatcattttgcaaaaattacttaacatgagaaataggtaaactggagtaattcaatacacttcaggttcttaacaaaatgcattttccctctaaatctaaacgggcttttttctctctacttggtcacacaggccagcaatcatatattcaccatgacagccaaaactgtgatgagaaatacttaatccattttaaagagcaaagtttacttgcacaataaataactctttatatttattatatggtacttccatctaaaaaaaatacaattcaattttctcaacaaccttgcattacaggtaaagcacacactgttaagcaataaccactgcatgtagtataatacttaaaaatattttaaataagttagaaatgtgaatgatactctaaatcaaatttgctatccaaatacttcttgagtatctagcatgtgaaaggtactttataaggtgcttttttggcattttatgtgatgcacacggattgaaaatcttagctacgtgctgcattcttgttaaatgcaaatgagtacaataatcttgttaaaagacatctcacactaattcctcttcaaaagaaagggagtgagaagccattcatcctgataaacttgcataagatatactgtactgattctttctctgggcttggatttctttttaatgatgtgcttgcacattaactacaggctacacaatactgaggaagttggagtggggtaagatcgcctatttaataacacatttcctttagaaggatcattgcttcacgttacagaggaaacagtcataaaactacatccacaccattagtccttgggttgtatttctttttgtatgtatattttttacaaggtttggggctgaaaaatcaggcactgattcaaagattaaatagatttaatatgcaatttttaacactaacgtaggcactaaataaatgtacagtgtacaaatgtttatttgaatactcttattttaaaattacttccagtgtttccctgtgttgttcaatggaacataaaatatccactccatataacacttaatttttctatttcctattctttattgttattattgaaattacatacttttaaaagtcatttcctattattaatggtcaatatcgttcttttaaaaaatatacattggtccaaaaagtatttatataaacaagtgtttatctgacatccccatttggaggtctccaagcatttcaagtttaatatgtcaataactgagtccctgttattcctaatctcagatcagctccattcttccaattgttcaggctgccatccgagatgcctctcttcctctcacacccacatacaatcttttagcaaattctgcaggctttaccttggaatccagaatccagaattcagctacttcttactgtccccattcaagtcatctccttctctcctgaattatcataatggccgcctcactggtttccttgcttctgtttttgacacctctttggtctacttaacacaactgctgaagcgattctgctaaaacatgatattgggccactcttctgctcaaaactttctaggggcttccccctctgacctcatctcctgtgaccctccctcactcaccccactccagccacaggaacttcgactggaatactctccttcccagagggctgcatcactagctcccatgctgactcagcctctactcaagtcaccctccgagtaaggccttccctgggtgtcatctaaaacttcctggacatctcccctgcccctgccctcaataccctccattctcctctctttgcttcaatttttatttagcacttaataagataccataaattgaattgctttatcttatttgtctatctcaccaataaaatgtaagctccaggagggtagcaattttttttctcttttgttcactgttctatccccaggacttagaagaataaccgaaatacagcaggcactcaataaatatgactgggtagggtgcatagttcacacccataatcccagtgctttgagaggctgaggcaggagattgcttgagcccaggagtttgaggctgtggtgagctatgctaaccccactgcactccagcctgggcaacagagtccctgtctccaataaaggaaaacaaataaataaataaataaataataaacatgtctgtactttgtgatctcaccagagagtctgcagagatgagcaaaactcatatcctcaccagctgtgacaaacactgcagtgacctcctcaaaaacacactgtcctcttccttatccacctgtagaaactcaccctcttcccctcaggaggtgaatcccaattaagtaaagccacttgtgacaaataatgtctactctgatagtaagaggcagggcttaggcatgggtatatgatttaattatgaccagtgaagttgacaaggaaatgtgggaaaatagccatctttcaaccatgaggagtgacatcaccaagtcactcaagatggcagagtagaaaacagaaaataccatgtgggacactaataagatcattatgacaattcattaactgccaatactccaaattttttgttgagtgagaagatacacccttactgtttactttacttgtagtaaggccttctattacttatatttttattaacacagaaaagtttttacgaatattcacacagtttcccacactgggttaagtcaaactaacacgaagttggattgattcctctggtagaagtcaggggttttccctttcttcatgctgcatgcctagacaacatgtcacatgacaataaaacaagatatttcaatggaaatcatattttctcataggaataatatgttacaaacagggtttcctcttaattaagaattgaaaataaacatattaccaaagcaaaggcagtacaaatatagagttctaataagttaaatggtaaaattatgctcccaatgactacatatttaacaatgttctacagaataagtgctcactcagagggaggaaaacatggaaggagggagagaggaggataggtggtaaggagggaagaagggaggtcccaaggccaaataaattcaggaaatgatgatttaagttaaaatagatcacgacattccctttctatgtgtatacactctggaaggcggttggaggatcactaccttccccttctatgtgtgtacactctggaaggcgctcggaggatcaccacattccctttctatgtgtgtacactctggaaggcactcagaggatcaccacattccctttctatgtgtgtacactctggaaggtgttcagaggttcaccacattccctttctatgtgtatactctggaaggcggttggaggttcactacattccctttctatgtgtgtacactctggaaggcgctcggaggatcaccacattccctttctatgtgtatacactctggaaggcgcacggaggatcaccacattccctttctatgtgtgtacactctggaaggcgttcagaggttcaccacattccctttctatgtgtatacactctggaaggtggttggaggttcaccacattccctttctatgtgtatacactctggaaggcggttggaggttcaccacattccctttctatgtgtatacactctggaaggcgctcggaggatcaccacattccctttctgtgtgtatacactctggaaggcgctcggaggatcaccacattccctttctatgtgtatacactctggaaggcgctcggaggatcaccacattccctttctatgtgtgtacactctggaaggcgttcagaggttcaccacattccctttctatgtatatacactctggaaggcggttggaggttcaccacattccctttctatgtgtatacactctggaaggcgctcggaggatcaccacattccctttctatgtgtatacactctggaaggcgctcggaggatcactacattccctttctatgtgtatacactctggaaggcgctcggaggatcaccacattccctttctatgtgtatacactctggaaggcgctcggaggatcaccacattccctttctatgtgtatacactctggaaggcgctcggaggatcaccacattccctttctatgtgtgtacactctggaaggcgttcagaggttcaccacattccctttctatgtgtatacactctggaaggtggttggaggttcaccacattccctttctatgtgtatacactctgaaaggtgctcaaaggacaccacattccctttctatgtgtgtacactctggaaggcgcttggaggatcaccacattccctttctatgtgtatacactctggaaggcgcttggaggacaccatcattcatctgagatgctcccactcatctctgaagtaatcctaagttcaaagtggaggaaggaagtaggtcagtgatagtttgacccaaaggggtaattttgagtcaaagggttttgatttttagctcaaagccaagccattaataacaaagccagaactatgactatccaaaacaagaactcttcaaattctcactacaaccacctaacaaaccacacactgcctcattataaaagtcttaaaaactttgaaaattctaataaactccttgtactatcaagtaacttactgtagacaaaatagaagatattttttaaaactttcctataggataaacctaactctatccttaacacagtatctgtaatatacagtaattgtttagttatcagtagttttagtagctgtcatttttgaaaaaatatttggataaatgatggctctaaaaaaaaaaaccgttcgaagtcactgaaaaaaagtaggtatttccttcaaaaccttctcaccatattctctaatagtaaacaaaggcttaaagttattctgttggtaaaacttcaaaaagcagcaactgaatcaatttaactaaggactttagtccagagaggatgtcttgctcattgtaaggttgactacagaggtctactgatttcagatccaatccctgcttccttctgctctcccctggtcacactacattcaggaaatgaagcaggagatgcagcagaagggtgagttaagactggaattaaaagtctgaagccacagaaggaccaaaagatgtgtgtgatgtaaaaatgattttacaaaaatataaagtagtctgtttgatttcaaatatggttcttttaaataatgggccactgagaaagctgaaaaattaaaatgatcaccgggcgcggtggctcacgcctgtaatctcagcacttcgggaggccgaggtgggtggatcacgaggtcaggagatcgagaccatcctggctaacatggtgaaaccctgtttctactaaaaatacaaaaaattagctgggcatggtggtgggcacctgtagtcccagctactctggaggctgaggcaggagaatggcgtgaacctgggaggcagagcttgcagtgagcccagattgctccactgcaccccagcttgggcgacagagcgagactctgtctcaaaaaaaaaaaaaaaaaaatactgcatactatgtgccaggactacgttaaatgcttaacgtaggcttaattcctatatggtaattctcaaataactctatgaatttatttccattttacagatgagaacactgagccttagggaggtaaggtgatttgcccacagtcaacaatagtaagtaagtggcagagttggggttcatacctagattatctggtcttgttcaaaaccaccacatcacagcctgtgtcaacttcaatccatttacccataaacactactttggctgaaatgcagtttcttaaagattttaagtagcctcaagtatacttctatactgtaatggtgactttcaacatggaatgtaagttttaaaacaattatcgagtgggttattgtcagttatcattattaactttattaattagacactagtaaatacctgttacaatactgctaagacatacattatttcacttaatcattaattgtaaaatagatactatccaattttacagatgaggctgagaagtttggtgactttctcagttaaggggtaaatctgggattcaaactcaagtcagtgtgtttcacagtaaggcattccacaatcactccccagtaaacctcaacagtgtgagatcaattgccttggtcacctggtctcctgatcatttcatgaaaaattaaccatctgtttacaaatcattcatcaaatttcttgttcctggagctatgctaaagacacaaatataattacaagtccttgctggaccccactagactctttaaataaaaatatgttcctagggtcatctagattctggcaatttctattgcaaattcaccaaatcccttgcttttgttactaccacaggataaacaccctgaatttcccttactggaataaagcctgttaaaactttttgcaggaaaatctctaggactttttaggtatcaaaaagctgaggaaatgttggtactttaaaataaatcctgacccagtaagaactggcactgagccttttattttcttgcagtcagcaaaactacaaacctataaaaattcaaatagtagttaaggggcatgcattttgaagtagttccatatgtggtgagtcacttccaaactcatgctttatactgaaaactttttttaacctggatatgtaggcagaaatcacttttaaaacctatcacagccatactatgaaacgaaaagcaagtccatgtgggagtttactaattgtttcccctgaaaactgttttcctggggggaaaaaatgaatattattattgactcctatgtaccaccttgctttatagttcaaacaaattcagaaactgtttttcctaacccagtattgatctagatatttgcaaaaatgaaatgaaagacaggttaatcatccaacaaacataatacacaagtgtgtatgaggagaggagagctggaggaagtggaaagaactaggtcagtaggtggcagatgttaagtggttcaaacttgaaaggaatcctaaaagcatggaccgaggtttgtggaaactcttaaaagtaaatgaacataaaaaataaaaaataaaaataaaaatgtgtggaagaaaggttctaattagaaggacatggtgattaagtaaaacagtgatcatccaaaaacctattttctttgttttgaaaaatacattagaattaacaatattgtccataacacattatctttctatagcattacactgatgcactttatgtatttcctcatttattctgcataatattcttatgatgtaagatgtatcctcatcttacagatcaaaaaactgaagctcaggttaactgatttactaagagtatatgtgaagatgcagggctcaaatataaatcttaggattctaaagccatcattttccatactattctatttaactgtggctgtgacagtagctgctcttaatgcctactcaagaggtaaaagagaaatataccctttgttttaaatttttttaaaaaaataacaattacctctgctttttctgaagagaaaacaggaatccttatatctcaaataaatgttttcttttaaaatacaagtttacaaggtaataagtagtattcatgtgataagtttatcagaaacaagtctaaatgcctgagccaatttaaatagttcacatttattcatttcatacaatgttgctataaaaataaagtctgtataattctcattttacattaaagtaaccaagatgaagagaggttatactaataaaaggtttaaaactaagaaaatagctttctgtggtcaccagactaagtttaaattgtatatgacttttttttttttttttttgagacagagtctcgctctgttgcccaggctggagtgcagtggcgcgatctcggctcactgcaacttccgcctcctgggttcaagcatttctcctgcctcagcctcctgagtagctgggattacagttgtgtgccaccatggccggttgattttttgtatttttagtagggacgaggtttcactgtgctggccaggctggtctcaaactcctgacctcgtgatccacccgcctcggcctcccaaagtgctgggattacaggcatcgtgatgtatatgactttctaacaaatactgtaatgatgctattcatccttaatagaaatccatgggagtatttaaataatacaataatgttaacgatttcttattttctgaaattactgcgaaaatggcaaattagcagtaactcagtagaggagtatcactattaatacaaactgcatgcccatgtttttaaaacacttacaaaagtaactttaataacactccttgtgaggttatatccatttctatgacaataaacaggctgtctttcagaatttttgtttgtgatatgaataaagccagaagatcaatatttttttaacctacactggaaaaaaatgctgaatattttctaaactttatgccctagataataaagggctgtgtatactgcccacataatctagatggccaataaagttaacttcccaaacctattcagttgccaaaagggtatcccaattgcacatcatattttgttacagtaaagaagattgagaaactataatcatttcctcctcccaaattcagtttctgctactactccgtgtcaccaacatctcagcatttaaatacataaaaccacagtcagcccaaatgttcagggtctatgtatgattacagaattcatctttgcttatgctgctgattctatgaaactcatttcctcctttaaccttttaccatttctttctgtgaactaaatttacacccactacccagatatacatgatcttcagattttgggggtttttttggagggggggatatctctgaaagtcaaacttatttcattcttagatactgttcttagcacgagaaccatgccctaatcaaataaaaaaaaaagtcactatccccaattcagtcccatttagaatctccactagccaggcaggctacttagcaatatttaaaaaatactcttaagaaatagaattgaaaaggttgggtttatcttgaagaaatttagggaaatctgtgaaatgattcttttttaaaaatatactttaccccaatgtgaattaaatatgaaaaactaaggataaattttgggaagttaacaaaacttttatctttgaaattgttacattctaagcaggtaatttattactttcaccaaaagcgtttgtactttccctcttgatgaacagcaaagaatattaagtctatagtaacttataaggaaataataagcaaaatttaagcaaaataataagcaaaatttgtttagctaacatattaaataaattttgcttattcaggtaaggaacattaaaagagcattctacatatcacagtaagttaagtcaaagaaatgtacatattcaacaaaataaagtctgagtactgtcataattacccatatcacactttgcaacctgtaaatttctaacacacatgatatcatttcaagtcttcatacaaagcacatgaaaaaactgttgcacaaatgtaagtaacttgcgtaatataacaaagatgaacttttatcttttttgatcgtttctaagctttaaaattatatcaggacacactctggagttgtgtttcaccaatactttgatttatcaccctatatgtgggaggcatcaagttgagtgctttgtaagtcacaaatttataaaagatacaaccccctccatctagaagtttataattttgctgcagcgatgaatgaaacgctatgaaaaataaaggcagtgtgaatggcattcatcaaccactaggagaaagtagatgggagcacatgttcccttctgtccgagtgatcatacaaatcacaggatggatggccttttggtaaaagaaaactagtagggttcaaaagacatctgagctgaagatagcaaaaataatgtggcagaataagaaatgtgcaattaacatgcttaaggaaggggcaaaccaaatatttgatcatgagatatgcaaggaaccaggtagaaataggacttgtcttatcttgtgagcaaaggtctttgttcagggtaataataattttctgcagaaagttttactttgctgtgtagaatgtattgggtaataaaaactaaaaggcaaaagaccaaatagaaagttactgcagtaactatctaataactatctaataatcagaacgtaataaagcctgaatttggaaaatggcagtggaaagacaaagaaaccaaaactcataattcttcctgttccaatgaaaatgattattgacatagtcataattagggttgactgcaatcaaatgttaaatatgtaaaggtgtaatataaaaccaagaacctgccaacagactttcaggaaagactttgatcacatttatcatctcatatttatcctacaatgtaacaaacattataatgtcccctttgaatgtattctagggtaccatataccataacttggtatgtctttaattaaatttttgtactattttaaaaacatttattgtagttgacctaaaaataaaactttgagaactacaattagataccacctgtataaaatgaaagccaaactatacttctctttccaaagaggaaatttggaaaaattactttccaaaaccttttgagctctgcctgatctatactaagataccaaaatataatgtatgtctcctatattttacagaaacagaagaaatcttttataaatgtacttctcagactgattaccaacataattttattatccaaatgaaaaaaacacatatttatacctataagaaaaattacctgaccataataataaaccctattttttgaaaacttcatatttacatattacctttcaaagggatgtgtatgtcagtttgatgaaaaaaactactttcaaattattcaaatcatccaaatgtattcttatgcttataacttacaatttttgttttcatttcctttaaatattccctgccccagaaaacctataaaggcaaattttcagaaataaaaaaaaatgtgtatcttctccatgcattcaataaataactagtctataaacaggtatgtcctccttctagatgctcagcctcagactagcttcttcagatttattagtaacgaacgcaacagaaattcttgccttcagggagtcccaattttagaaagattaaacaataaataaactatactttaaaaagaaacacaaatttcattgtatttttaaaggtgttaagtgcttggaaaaagagaacagcataaaggagagaggaaaaagaggaggcttccgttttgaattgtgtggtcaccagggtgggcttcactgagaagacgccttttcagctaatgcaaggactttagttttataccaagtgaggtgaaggcttttaagcagagaaatgattttcttttcttactacccaataagaattgagtgtcaacaagagtaccaatttcatttaagagtgtggaggtagtattatcaaaaatgtgttgggggtagggctataaaacaaccactgtatcccagatctgggaaccaaaacaagcactaaagtgtgattatgccgtttatttctcaaagggctattccctccacaataagtttccatattgactgttctcacaggtcaatagtcccttatccacattcccaattttgaataccaagaagctttaaaacccaatttggtggcaaaatcaaacccacattaatgtgagatggtttatagtcttgatttatcccatttggcaaaaataaacatgaagaaacattaaccctcaaaatttaggtaacctttaaatatcctaagtaatgagaagtcataggcacatctatatgtacacatacaaactatctgtaaacttccctattttattaaatatggtggagttacagcatacagcaatttatcacattcaattaagccagccatgcttttgaaaaaagaaaaacacacttcccctaaaagtaaaattctacctagtataatagaagctggaataagatggaagatatgaatctactgttacagattttgattttttagtttaaagatatgtatctgtcattcaacatgccccctaaacactggctaattgatttatctgatgttcaaccaaagaaaatgctacttattccaaaatagaaggaaaaataggctgtttgaaacttactgaaagatggtacttcagcatttgacatggcacctttctactggatttttaagggtaattttaactagtcatgaacttgactaaagcactgtcttttaaaaacccaaaatgtaactctatagctgtgctgtctaatacagcaatcactagacacatgtggctactgtgcacttgaaagatgactagtcagaattcagagagctgtgcgtcaaaacacacaccagctttcaaaaattcagtacagatttacattatttttcaatgcaaaatatctcataattttatattgattattcattgaaaggataacattttgcagatactgggttaaatcaaatatattattaatttcaccagttacttttaaccatagctactagaaactttaacatttaaaatttaaacttacataatgtagctcacattatacttctagtgaacagcactgctctataggaaagacctagaaaaagattaatttttcaaatacttatatgctagaatgaataatatcaattttaatcaccagaataataaaaacacaaaggtcacaagaaacgcttgtcaggaatgctgaaataagtgttttgtgactcaaaagtatctattactttaaatattcaaagaggtgtccaaatattcaactaataaaaaaagccttcaatacatgttatgcctgatttgcttcaaaatccactttcagtatttcaatcatacgatcataagtacatagaggaggatattgtgtcctagtttcattcactagggttagaacaaacccaggttttgtgagccaaatacatattataatggaatcagaaaataggtaacttattttttaatagatgggaaaatttaaataactcctaagaaacaactttagagtttacattaagtcaaagaaaaataagtctctctaattataaaacctaccattaacaaaagacacactgattgacatttcctaaatattcttaaaagcactgtaagtacctattactctaaacacatgcacatcccaccacccagcagttccactcccatgcttacactgtactcatgagaaatgaaggcttatttctaccaaaagacccaaaaaagttcacagcagccttatttgcagacacaaactcgaaagaaaactaaatgtccacttacagtggaatggataaatggtggtataatcatagaatagaacatagacaatttagggggaaaaaacaaataacatacacaacatggatgactcttacagacataatgttgataaaaaaagacactgatgagttcatacgacatggttccaactttatatagtttaaaacaggcaaaactaatctatagtaaaagacgccaaagactattcctgttaggtagaggcaggatcgattagaaaatacacaaattacaataagccttctggagtagggtgctagttactcagactatacttacataaacaacaatcaagctagcaaataagggtgtctatttgattacatgaagttacacttcaggaggttttgtataaaaataagaaacttcttcttaaaaggaccttatgcattatgatttcttttcaaaataattacttaaaactaattcctatcttgaatatacatgggaatttgtcgatttaatccttcagctaaactttcaatttctttgcagtttctttttaataagaataactatcaactctattgaaacatacctttaattttgagatatgataacctttcatgaattgataattcatattagcattaaaattataacttccatctttatagctaagtgtgaatgtttatacgaaatatttataatagttcattctcatctttaatttgaaaagataactctgaattccataaaatccagtttctgatcatataatttattttactgataaagtatattttaaatttaattttttgggttcatttacaagttctttcacagacctaatttgcttatttacatttcttatttgcttttgcctttcccccgtaaccgacaaaaagaggaagaatatgctggtttgccaataaataataatcttaaacacagagtttccattttaaaagttcaatgcagcatgctggggagacttattaaaagactgtattcaaccaaccctagaaattcacactgcttgacagtgattaagaaaatcggtaaaaaccaatttttgtattatttcatatgaataaaaatcatgaatattcagctaataaagttacatctgtattatagtaaaagaaggtggccaattcactataatcttaacaaatacattattttattgcatgtatttatgcatccttccttcatctgtttctatcccaagcaagacagctggcaaaagtttttgagaaggaaaacacaagatacagaggaggtataaggtcgaatattaagaaggatgccttggatatagatcaagaagactatgttcaccactgacattagtcaaattggctggcatatccatatgtgatctatgaggtatgctatggcctgaatgttgtgtctccccaaaattcataaattgaaaccatatttgcaatgtgagggtaatttggaggtggggcctttggtgagtgattagatcatgagggcaatgccctcatgaacaggattagtacccttataaaagaggtcccaataattctctggccacctccacccatgtgaggttacagtgagaagtcagccatctatgaggaacaggcccttactaaacattaaatctgctggcaccttggtcttggacttcccagcctccagaactgtgagaaataaacctctatggtgtataagcctcccatctatggtatttgttacagcagctcaaatggactaagataaggtacaaaagacaaagcacaaagtgagtaagtttctcaacagatgattttaacataaccttccttcctagtaatatgtcacatgtcctgacactctgggcctacaagcagataaattattatgctataccaatctatccacaaatgataatgcaaagagagaatttcgcaaatggatgttcggaggcaaaaccaggtggcctggctgagtctgtccacggactctgatgacagactgatccaaatgcagatggcagctgatccctacactagaaggtagagctgtcacaggcaggaagacttttaagactgcctgaatgtttcaggtatacttcacactgtcttagataaaaaggaactttatgtatctcattttcaaatcaagacattctttaaaatagttctatagtagtaaagtaaaatgtaaatacctcagtgtttaaaataggtaaaactggtttactctaaaccagacgttttattcgcttacacaaaattttgatttaccaaaattgaaatataaccttctttgtgacaaatggcaaggtagtttatccatatctaaaagttaaagaaaaataacaaaatgtggcataacagtcttacttttctacaattggaaaggcttgataacatttttaaaagtggggcaatgagacaaaagacaataccttctggctgtgtttctcccaaatgttaaaataatgagtcctgagaacagttctgaaatagctcacaatccaaacacttcctgaaaattaagagaaataagtgttacttcaagtgcaccttatctcaaagatttgttttacaatggaattttaactactaactaaatcatctcaaaaaacaacaaaaaagatgtattacaaggtaaaaaaaagtattcatattcttcatgatacatgctttctttggacatagttgttgaccacatgtaacaaaacagctttcattacagaattatttgccaaaatacactacccaattgtttttttgtttgtttgttttttgaggtggagtctccctctgtcacccaggctggagtgcagtggcgtgatctcggctcactgcaacctccgccttccaggtccaagcgattctcccacctcagtctcccaagtagctgggattacaggtgcccagcaccacgcccggctagtttttgtatttttagtagagacgagttttcgccatgttggccaggccgatctcaaactcctgacctcaggtgatccacctgcctcggcctcccaaagtgctgggattacaggcgtgagccagcacacccggcccactactcatctgtttttattttactataaagattgtccctattgtcaatgatgtaaaaagttaatgtcaaagataaagaggaatttcagtcaaggattctgggagaaaaagtattagaattatttaacagtcattgcagagtttgaaacacctcatttcttttctgtaccactaggaacagaaaatgttaaactcagaattagaaccatactagatatagaatgacactgacgtggaaaagttcatactttcaggaacaaaagagtggatcaaagtttttggccagcaagagatgtagcaaacaatttaacattgtggtggctgaggaaactttattttggtcaacaggccaatggacagtgaagctagcggtgataagggaggtaccatgcgaactccctgataccaccatagcagcattccatttctatcagccacgccacttagatctgacttatacttctagaactctcaattcctagcctataacctatgatcagttctcacagattatagctttgaataaaaatacatctgtaaacctgaattctaacctcccaaaataaagtagctatttttcattttcatttcattttactgggggcccttcagtctccttaaaaccacttaaagataacaaattgcttaaagtaatacttccccaaaatccagctcttcaccactatacctgtaggtcacttagtctgtatcttgcttattgttattctccctgtgtctgtgagccttcaatacccagcatggtgcaaggtatacagctggtactcagtaaatgtctgataaatgacatcaattaatcacagagccttaatcaattaatatgccaggcttaagtaaaaatataaaagagaagacggtagttttatatggaccaactacaatgaaaaatatatgcctttaattactacacacacatgcacattctctctctcatccactcattcactgtcagttcttcatcagtaagactcctccagtatcttatttcaatgctctcctaatccccccggcccagacaatcagcctggttgggtggtaggtgtccattctacccagatgagttgggactctagtgtcgctgtctgacgtcctataccaaccagcatggtactcaggcattattaatacaagtctctaagcacataaaggcatacctcagagatatagtgggttccattccagatcactaaaataaagcaaatatcacaataaagcaagtcacacaagttttttggtttcctagtgcacataaaagttatgtttacactgtactatagtctattaagtgtgcaaaagctttatgtcgaaacaatgtacataccttagtataaaaatactttattgctaaaaatgctaacaatcatgtgaatctttagagagttttactcttcagtggtgggcaccttgcctccatattgatggctgccaaatgatcaggcttgtggttgctgaaggttggggtctctgtaatgatttcttaaaacaagacaacaatgaagtttgccacatcggctgattcttcctttcacagaataattctctgtagcatgtaatgctgtttgatagcattttacccacagtagaatatctttctagatgggagtcaatcctctcaaaccctgccactgttttatcaattatgtttacatgatattctaaatccttcgttgttatttcaacaatgttcacagtatcttcaatcaggagtagattccatctctagtaactactttctttgctcatctataaggagtaactcctcatccgtccatgttttctcatgagattatacaaattcagtcacatcttcaggctccacttctaattctagttttcttgcaatttccaccacatctgcagttacttcctccactgatgtcttcaacccgccaaagttatccataaggggtggaagcagcttctttcaaactcctattaatgttagtattttgacctcctcccattaatcacaaatgttctcaatggcatctagaatggtgaatccttttcagaaggtttacaattgcctttgcccagatccatcagaggaatcactatctatggcaactacagcttcacaagatgtatttcttcaatagtaagacttgaaagttgaaattactccttgatccacaggctacagaatagatgttgtattagcagccatgaaaattaacattaacttccttgtacatctccatcagagctcttgagtgaccaggtgcgtggtcaataaacagtaatatttcgataggaatcttttttttctgagcagttggtctcaagagggggcctaaaatattcagcaaaccatgctgtaaacagatgttctgtcatccaggcttcttcttccatttatacagcataggtagaagagatttagtataattcttaaggggcttaggatttttggaatggccaaacattggtttccacttcaagtcaccagctgtattatccactaacaagaaagtcagtttgtcctttgaggttctgaggccaggcattggtttctcctctctagctattaaagtcctagatggcatattcatccaacagaaggctgtttcatttacactgaaaatctgctgtttaatgtagccatcttcatcaatgatcttacctagatcttctggaagcttgctgtagcttctacatcagcattacctgcttcatcgtgcacttttatgttatccaggcagcttctatccttaaacttcatgaacaaacctctgctagcttccaacttttcttctgcagtttcttcatctcctctcggcctttgtggaattagagtgaggcgctgctctggattaggttttggcttaagggaatgttatggctgctttgattttctaggcagactactaaaatattctccatattagcaataaggctgtctattagtccgttctcacacagctatgaaaaaatgcccgagactgggtaatttataaaggaaagaggtttcattgactcagagttccgcattgttggggaggtctcaggaaacttaaaatcatggcagaaggtgaggggaaagcaaggcaccttcttcacaaggcagcaggaagaagtgccaagcaaagtgggaaaagcctcttataaaaccatcagatctcggccgggcgcggtggctcacgcctgtaattccagcactttgggaggccgaggcaggcagatcacgaggtcaggagacagagaccatcctggctaacatggtgaaaccccatctctactaaaaatcaaaaaattagccaggcgtggtggcgggcgcctgtggtcccagctacttgggaggctgaggcgggagaatggcgtgaacccaggaggcggagcttgcagtgagctgagaccgcgccactgcactccagcctgggcggcagagcgagacttcttctcagaaataaataaatcattaaaattaaattaaaaaaccatcagatctcatgagaactcactatcacgagaacagcatgggggtaactgcctccatgattcaattacctcccactgggtccctcccaggacacatggggagtataggaactacaattcaagatgagatttgggtggagacacagccaaaccatatcaggctgctttgtgttcttatcattcatgtgttcactggagtagcacttttaatgtcctttaagaacttttccttttacattcacaacttggtgaactggcacaagaggcctagctttcagaagagcttggcttttgacatgccttcctcactgagcttaaccttttctagctcttgatttaaagtaagagacctacaacttttccttgcatttaaatacttagccattatagggttattaattggcctaatttcaatattgttgtgtctcaaggaacagggaatcccaaggaaagggagatgagatgggggaacagccagtctgtaaagcagtcagaccacactgaacaagttcgccggctgatatgggcacagttcatggtacctcaaaacaatcacaatagtaacatcaaagatcactgattacagatcaccatgacacatataataatatgaaaaagttttatatattgtgagaattatcaaaacatgaccacaaagacacaaactgaaaacatgctgttgaaaaaatggtacttgctcaatgcagggctgccacaaaccttcagtttgtaaaaaacaaaattatcttcaaagagcagtaaagtgaagcacaataaaatgaagtatgcctacacatcagcaacaccaaagctaccctacatcattaacagggtatgtcacctaagtgtataagtcaaagatatctagaatcttaactacaggcaggatgttcccaaaatcttagtcgacagaaggcatctcctcaaaatagagtttataatcagacaaaaacaaacagaacctgaagagacctccaggtgataaaggaaaaacaaaaagcattatcatttcctattaggacattacttttttaggagctaaataaaaacattaccaaatcattttatgtaataaaatttaaccttattttgacctttctcataaagcaaataaacctctctatccaataaggttccatctgaactatgtaagatgataggcaataccttaattgcattcatttacatgactctgaaactattctgggctgaagtcactgaccgcaaggtcacagaatacaaaaaagtagaatgtgtgtaatttaccaaggagaaatgatccacttagacagtgtggcagcaccttttccatccttcattaggggatactaaatgcttaatgcaatcaacaggtgtagacatctccatttaaaatatatcatacaaatacatacacacacacacgtattcattttacaaatatataaataacactaaaatatatatttgaataagtccatcatatattatggctttcttcttaaaattaatctgcctaaataaagaacaattctataccctaatagcatttagaagcaaaatacaatatagggccattattttcccattgtcttataaaatttctaacacctaatattcaggttacaaagctatagttttaggaaaagaatttaaaacacaggatgccaagtatgttaagagttcttgctttcattttttataacctaaacacgaatatattcaactaatttgcttagagaagcatagtttacatgtctcaaatccaataatactatattaataaaagaaaagaggtacaatagattgacagattaacaatcatagattacaggggataatgtgtattctccaaaacctcaagagtatatcaaaacacacacacacaaaagttaaccctacaaattatttccctttagctttgtaaaatgcaattgtaacacaaacaaggtattattggcacttgaagttactggagaaaagagaaggaactcaaaagaataggatttagggtactttttaaatgtttataatattagtacatatgcagactgtgaagtatttgtttcaggtttaatacaacatcaccaaaagattcatttaaacagtttccacacattaaattaggtaaatctctcacatttaatttactatccaagcacttttacactactcaagccaatcttttgcaacttacaaatgatttaatgaaaaaaaagctatgatattataaaattcatgcttcttcattttctctccctatagagaagggcaaaacttttcttacgtaaatctatattagatccaaatcatttcaagagatgctactccacaaagaacacacagatggacatatatttaattaatatattcctaaaaaacttcaatacatgatgtcactttgtcctttgtaaatgagaaataaaatttctcaatgtcttcttataagttaagccaattcactttggattagcttagttttaaaataaatgcatacatatacataataaaatactaattcctattgttatctacatataactttcagtgaccacatcttggtattttaattttctttctataagaaacaattcagagtcagacatgaaatatatgtgtgtaactaggtaacaggcaatatttggttcctattctttgacaaggataagctattgagaccaatcagaaccttccaatgtgtttccaatgttcttggctacatttctacttaaactcaaacctcaggaagaatataatctgttaagataacttttgtttttctcaaacattctctctctgcctatcccaaaagaatcaatcaatgctttatgttactaagttcactgattatgaggacaatgtctgaagatttcatacacataatattgggatcttccctttccttgaatttcagaatatgttggagccaatttctataaccaaaacgtagtatttgtgtatctttaaatgagctacaatccagaactgaaaatgaactatactaatggcatcgcacttaacaactttcaatgaagaaagaaataggttagagtctaagttcaaacacacttcaaactcacgtgaccacagtaaatcctacccttaaagcaagtacatatgtgtgtattgtttatgtttcttattttctgtatattatgatggttttgactcctttctggctgggaagagattgcccctctaggggccagccaacgcttagagaaggcaaaggactcagcgtgcctttcacatgcaaactaaacaatccacagcgatacctcctctacctgacccatacacccaggaggcaatattcccctgcctggtatctaccaggcaaactagggatcactcttacagtttagagcctgtatacctataacttattcaaagctactattattacacacctatagcttattagtagtagtagcagtagcatttacctacagctaatgcaaactagcgaatcctaaacttggttacccgccctgccttgcctttcccacagatactccagaaacggctgcagcccggtctctcttctagctcctgcccctttggcccctagaccaacactggggctttctcatgtggccctgaatggcatgctgtgcctccgagaactcatgagtataataaactttgttttcctgagcccctcctgggtctccttttcacatgcacctgactgaccacataaaagaacacagaactctgtgtgtgtgtgcgcgtgtgtgtgtcattttcattttattttcccttgttcaggtggtcaataaaaaattattacacctttaaaaagaggtacctaaataaacaaacctaccaattctgtatgcaaaattaaatcctggactggcagtgttgctcagataacactcagaaaagaacaatgtgactgaaactgtaaggaacaggtcaaaaacactccatttaaaatgtgaacacctgctacagaatattttgattcacaagtccatctaggaaatatttttcttcctccctcacctgttcccccacctatcttgcattcaacaccataaacagcacttatcccccattataaaacagttgacggttaaaacaatgagccaaccaagaaagtataatactctataactgacatttactgcattggccttggacttctaatctttaccagacgggcacacaaatcaatccatcagctcataaaggtgtgcttttttaacctctaaaacagatgggattggccagaagtgtctggcatgtcaaactgctaatcactgctgccctttgcacaaaataacccacttaagttgaggcatggttgcactgtaaccgacattagtctgtgggaaacccatttaactgtcacacactcctgccactcctgctctcccttaattaagcctaatgccttatgctttgaccttttgttctagcctattaaccctatctagtacaagttcaattatgttaagctaaaaactttgctgtaaaatattaaatgccaagctcaaaaaatcataagggacatcctctcagccctaagttctattcaccctgatactcaatacatttgaaagtaaaacctcactttcgaagtaacgctgatactgaagcaaggagatgttgaatgactcacccatttcatagcttttccgtggcaaagcctcactaaaacctatctaatccctagctccaattctttaatctccatggtgcttctgattaatagttaaaccacccggaagtatgttaaggatactaacattttcaccccgaagtattatccttcgccatcctctagaatatgctatgcaaagaggcctaaaacaaaataaactgcgacttcagcagctgagaagtaatgattcctttcccctcccacacatcaaaacttcctatcctatcccctcactactttttttcctttttaaaagtaacaatggtcattgagaactactaaatcctgcaacactcacaaggtagtatgtacaaccacagttttcccccgcgatacttcactgaagtattcaatacagccaatgacttaaactacagaaggtaattacaacttgctacttatcctcactggacaaattcacgcagcatatcttttcaaatacgtcttttttacacctatatgcatatgaattgctgctcacatttaccagaattccaaaaaacacaatgaaaaacacttcctaattcactgtaaaataaaacaaaacgtagtccaaagtaacatgctatcattaaagatagttttaccacagtgatgtatactgttatttttccttccatttacttcatacaattaaaaaaaaggttcctaccactctcactgtgacacataaacaacttaaagatcagtaacataaaacaaaatttgaatttctgattggtataaagaaatccatattaattttagattttcaaaagatttaaagtcagattttaattttacttttgttgactgcccaaaggcccatttttacctattctcaatattaacaaatattgtcagcttttgcctttagcaaccctaaactttacagttttaaagtaacatgccattaaacagaatatacaatgattttgcaaaagcaagatcgtttagagtactgccaaaacaatgaataatctcaatgagataatttattaaaggaggaaaaaagagaacgagagtttaaaattcacagtgaatgtgtttgtgttgttagaatgatgcctgcaaaggaaagcattccttggcattatcgggaggaatacccatggatgtgtaaaatgtaaaataaatagatagatgtatggtcaaagctaagcaaacacttgtatcaggggcaactaccaggaactttagttttattcacccttttcattgcaaaggataatagtgttaattttgatcagatgtcatgccttagctacaacttttagttcatgaaataaaaattaagtttgggtgtctgctgaggaatccaacagtgggaaattcacactcacaactaatttatagaaattcacacatttctataacataccgactgacactaatgaacaatgagggaaaaaattgttcaggaattcaggataagtaagcactggaggaaagcacacagtagaacacagtgcataaatagtaaatgtgctcatttttctgcccttttacttcatatattagtccattagcttgttcctttttgctatgatttacaagcaggtgaatacacagaaatatgagccaaaagaaatatactgtcaaatactcatgaagttacctttgttaaacaaaaaagaaacaacaaacaactttgtcttcacaaagcaagaaactaggttaaagttattttaagagcatctgttaaaaatcagtgttataaatatatatccatataatttattttctattagcattttaaaataaatttctcgtctagaaatctctgagctccatttcaaaataattttattttctgtctcttaccagcagttattaatgtagttgaatatgactcttagaaaagagtcaggaaattcaccttcagtgaagagcaaatcctaatttttaaaacatagatgggcttcatatactacttaatcccataacttaccaagttctgaatcatcaactgttcttgataccctcttaacttttaaggttactgcacaccaaaatgaactctggatgtgaaatgttaagatttccaccttaccaagccgtcaaatccaaggcagttaagtgtgcccagctggcgggtccctttgactacaggaagtgatgctaaggaaactgcctagtaggctccagaaatatttgtattcatttccttacaaaaaaaatgttgcccccaaagattttgctaaacgttttctaatataatttgcgtattactgaagaaatgtaatattacaaaacaaattatttcaagtaccaattaattataatgtcaataacagtcagtttcactttttccctcataattagtatgcctggaaagaagaagatacattttaaggaaaaaatattgttccttttaaaagtcctaatttaaacagactaaagaaaaaacgtggaagagcttccattattcataagttacacataataattaacaactgctatgcataaatacataaaggttctactgctgtgccaaattttgccagtggttgggactggtacagttcaatttaacaaatgcttatagacatccttctgtgtgccagacacttacaggaccaacagtacactgatgaataagctcctattcatggagttctaccaaggaaaacagctataacacaagtttaacttttacaatcagggcgtacacaaaactgtgaaagaaaatctgatcttgttagaggcttggggacagaagtaagcctacaaactcccttgcccactgtcccatgagggagaatattcctttccaatttgtttcaccaacatcaggaacgtggccagtgtgtggtccatgaaaaggtctacacataggtttcttctctcttgctctcttttctaggggtgtagaccaacgtgcacttggttcatggcacattatcaccactggtccacacagtgccccctcatcttatttgttacctttctcaagagaatagaggaatggggtccataaactttgagatatgtttccagttgaaccaacagacccaaccacctacattaatggtgttggaatactactcatcagtaaaaagtagagctggcctgtgagtgttctggtcaactaaaggtatctggctctctttgtctgcaaataaatagcaagtctccctacttctttttaaataaaattccaaatgtacgtaacatgtaaaacaatgccactgcatgaacatgtacataactgtactattctttttttaaattctcagcctggaaattacatttcaagtactagaatattcaacaaatcctaagacttttatgaagaccatgagaagaaaataaggtactagaacaaaagtgatgcagccagccaattctcgtttcatgtctcaagacccagttcttattattatagatccctttgtggggttagcttggattttactgcgggatccatcaccaaaggttattaactattccttaacacctggtacacaaacccctctttctgagactgctttgacaaaaataaacaaaaaagtgtgaaataaatcaagatttgactgaccatcctaggtctacccaactgctagctgaatgactttcaaaacgtctttaaattcttaaggactcaatttcttcctccgtaaaatgcagatagtaactgttttgggcattttaacttaacagcaataacaaaaactacaggaagataagtaattattgaccccattgtatcacatggatcccctggcaattaaaaaaaaagatgaatgagatattaagaaataaaaaggaaaacagagtaaagacaaaacagaaataaagaaggaaacccaaaaggaaagaaaatggcacataagcactaaatggtagcattttatcattattttatttatagtctacactaactgtgtgctcttccatacaaaagatgcatctaaaaactaacttgtttgataaatggggggaggacaaggtgcctctaagataggtgtgcttaaatccagagcagccgtagcttttatcaaattctcttccaacctgaaaaatctaacgattctatgaaataacttcaatttgtgaaagcccaagcaaaagaaattcaaagttaaaaaaaaaaaaaaaagaaaatgtgactttgactcaggtcagtcaagtattaccaggatagataaaagtagatttttagcaatacagttaacaatgggtcttgccacaataatagcaaacatccagatattggaaaggaatcagatggtaaatttaaaaaagactgttttcaatccttatatttggcttcacatagattcagtgtattttaattcatttttttttaaaaagcatggatcagttaaggaaataatataagttcattctgatctttaggaagacattcttccccccatattgttcactttgacaatttctcttttttcttatttggccaaaatataacgtattctctaaacaaaacacagatgtttcctttgcagcttttatacaaatctcttgcttttccaacatgatttggcaactcaaaatccaaagcaccctagaaaatattatgtttacacgtcttattattcatctttgtgtctccaatatagtttcaatttgactatacctttcagtgtatagggaaccactcagcttgaatcttttaggttcaaaaattccataaattttaaatgaggcaagtaaaaggaggtggagaagctcataactccatttcttatggctttaacaataaaagaacgtacctggtatgtacttaaaaatgtactatgtgccacaaagctcccccactcaacaatctccctcctgacacagtctaccctcaaaataaagtcaactactcctcatctctctgcttccacttccttccaattcacaaatacattgttaatttcctctttgcatttcagagagcagtttatcagcacaggatagtctttaacaaaattgttgtgagtgaagatagggtaattaaaaaaaaaatcatgttaagaactgttaatagtcaagagttgtaacttttcaaccaggaagagctatggttctgaatttgctacaactgctccttgaagtggacaaacataactagccttgggaacactcagtttaagaccatgacaagctatttcaatgaattatataaagaaacatagttgctttcactgcctcaaataacaccgcagtaattctgtgatacacttcagaagagttagcactggagggaaaagagcctgtgcggcagcccttggtgactacatttccctccagcgcaatgcaggtagcaggacatcagcgctttgagaactagcataagctgctgcagaatcatcgactggcaacaatgtgccttcccagagagcctggtcttggagaatccaggctatgaggcttgcaaatgctgcatgagttttatggctaccaggttgggagcaaggttttttaacggcttcctgaatgtcagatggcaactggttttttcttcaaacaatggcatattctttaagaaaatcaaattatcaatgaaatttgccatgtgaccacaggcaagttaactattcttgcatttttcagactaggtttccttatctctaaactagagaaaatgatacctacatgtcacaggggaactggaaggattaaaagacaaaatgtgtgtaaagcttccagcacaatgtctggcacaaaacggttgccccaaaaagttcaatactcttcctttccctgctccccctcccaacaaaacaggaaaaggcaacagccaagtaactaaacaacttcttaatattccaagtttctacccaatcatctcttcttcttttaaaaccacaggcttgaaatctttactgtttactgtcaacaacggcatatactgctgtacagtcagaattttagaatttagaaatcaaatataacccccttattcaacagatgctgccgggggagataaaagggctttccttttatctgtatcatcttgatttagtagcagaacctaaactcgaaaaataaacgtggaataacaggaatactattttttaacatgtttttcaaaaatcaaacctgagcctacataacccattgtgcaaacagtccctttaggagaaaaactgcaactgtgattaatttctctcaagaatatttatttcccatttggagagtttcacatgtttccaaacatattttcttgatgtcctccatgtcattgtgtattctctccttcccttaatttgtttcttttccagtgtataaatctattgctctattatagattattataatataaactcataaattcaggaatttaaaaaaaatctttaaaagcatgcttctcagaaatcattacactctgttaaacacttgctatctctcaacttctagatagattcctcaagagagaagtccttttttcattctgaacttctaattctcaaattttgattgtgtcctgttagttaccaaacacaccattatactactactctcatttcaatattgtacataaacgattccccatcttactaatgaaatgcttttttaaagcagtaacatatttaacatgtgcacatgttatgaagagtataggcaaactcaactattaaaaacatgtaactataaggaaagccatcttagacactatatgtgactacagctaagcttttctcttaagtatctaaagcaaatcaccagacttttacatagtaccctcacatagctagataagaaagtaaaagtaaaataatgaaagcagactctaaacagcagaagctccaaactccttagtttctctgttgtgctcaatcctttagcaaattacaggcctgaaaacaaggagtagctctatcacttaacaagtgactaaggaatgactttgttaattagaagtccaagggtgagaggctcctttccaccaaagctctgaataaacatcaacatcaggtcaaccagagttgtcttggtcccaggagtagcttaagcggatgactcaaattcccagcagaattctagtttaatatttattggaactccgagcttagtcacacagtgacttggaatttaagacacatggggtctcttctttccatccttaaagatatttttgctaagtgacacaaagttaaagaggcaagatgggttttaatttagagtttttattccctgaggtgtaagaaattaaaattttattttctggggagagtgaaccatactagctctgaatttcaaacacaactattaaccctgtcagataattctattatcaagttttacaaaactgtttactattattatttttttttgctaccccagccctatgtattgaaagtggaaagaaggaagggagggaaggagggaaggagagagggagaatggatgaatggatgtatgtcacaatcacctttctagccaaaactgcaacatatgctggagttcttgaaattatttcaaccaaaaaaagaatcacaggactcataatttgtttagcaggtaattatttgccccattatcttcaagaacaatctatcttaaaactgtgtatagctttttaagaaatcttaatactaagaggatcctttttttcataaccccaaagagtgttttcttcctctatttttgaattgccagccttctcaattctttaaatctgattcacattatactacttttagagttctaggctaaatgtttatccatagcatgattcaaggtattaatttcaacaaaatactaatataatgataaaatgtatcacatttattttcaactctttcctattcttctgatttaagaacttaaagaaaaatattttatgtttcgggtgcattttgataagctaaaataccacaacttttgtaattcttcatttgtaatatttgcaagatagtgtagggatcaatttgaatttcaaggttcatgatatagagtatgtaccataacagtgagaaaagttagtataaattcctactcatctcagtttctatatttattgcaacaaattaaaactgcatttcataactcgtagtaaaacaaaaggaaagttctgttttaaataaactccaaccttcagaatcctatacattcagtatccatcaacctgaacactaaatttcaagaaaaaacaacagatgggcatccatataatagtttgcaaagaaaccctgataagacttcaggagtttctgtggtctctattttccccctaccatgaatcataggtaatgtgcttaaataaagcattatttctgcagttatttacatgtttatctttatcagagatcctataaaagaattatccagttcaccacccaaactttagcactcagaacacggttttccctgttgatgaagacccttgtaaaattccagatcttaaaagattaaagaaaatgtgatctaatattaattcattttcctccaaagtataactcctgattccatgctggtacccaattttgatcctctactttaaagatatctcagagacattcaaaacaaagtgtgaacatgcacaaaaggggaacttgtcgtttctctccctcaaacaaccactatttatataatattgctggcctcctaaaagagaatagaatccattaccatcagcaattcatgtctctgcttcagcatcagatgcaaacaggatacagaaactagatctctctcctccatttactttttgttcattccaacctctcgacataatcttcagttccattccaatggcctgtttcaccatctgacactcctggtttttaccttctcaagtcttagtggccatagtggtgttacatttctctaattgttgtgttatctaaatactacaggatgagcctgctcattccccctcccccaaaagtccctgaaaaaactacaacttaaggaaatgcaacttgaacctttttagttcacagattcaaactcatatcctgcaagaccctagcatatcttgttgaaaattttctttgacttttcaacagtagtcaagattattttaatgaaaatatttctccagttggaagacatgggtatacaggactttgctagaacggcaaatgctttttcccagtcttcatccgtgtaacagtaaatcgttattaaacaaacacacagaacaaaacccactctgattgtgtatcaatcacctgaaggggcagaagggaaaagtacaagagtgaagaaacttctccccacccacagccaagaaggaacgctgcaactaaggcagtttttcatggaagaaaatatccaaagatctagacagtgtttattttagaaaaggggaagagagcaagggagggagggaaatggtagggaagggactaccatttcctcttactaacctacattaaaaactaattgtatcaagcaatctcaaatgcgaaaagcaaaactgaccctagcacaatttaaagtgaataatgttttccttgacaaaaattcggtattttaaactcattctgagcaaaattatcttttaacctgatacaccaaactattactgcttttcccaaacaacagttagaacatgagcttttgagtttcttacattctttacgttttaaaattaaaagccaaattcctttaacctcatatatcctaagccactctgatttaaaattacttctatgtcattgtcttctagcattggtctgcaatagaatctgtgcaattaacaataatcttcttccctctgatctttctagagtcaaggatggcatatctccttatcttatttgttccattagattggcatattttgcctcatctgtcaccttctatcaaactctgctttcagatatgcgttaattcatttttagttgtcctcaatgttctaaaatagtgatgtttgacagaattaatacagtgctctagttctttctgttcaactggtatttaattaaagatcttggaggccatctttctctcaggctacaccacttaaaggaggaacattacttcctccatggacaatgtgataagccacatggcaacaaagctgcctccctaaggtctctcatttaatagactgctttaccacatataaactaccagcaaaacagattatcactttaattcacattgattttactcttcatatctctgaatcacaactctgtcatgggctgcgttctctcttaacttctgaatttccagaatttctgtagttgtaatgctctcctgtatttttgcttttgtttcatctggacttcaaaaagttctaatggcatctgattgggaagatttcttgaatctctgataacaacgcagaagtctttaagcaatcagaactgccttggcgcacaaactgaaaactccgttttaaaatcttctgaattaacatcttttggagaatagcccactcaacttgatatgtcataattttcaattctaaaggtggcacggataatttaaagtggcacttgctatttattacttaaataattgttctcttggacgggcttttgaaagctagtacttcttaatcattttcgactatatcagaactgtaacagacatgtcaatttaagcaaacttcatgagcaataaactaacaaacagactctaggtggtggtataggttattttttatcatgatgttttgcacttataactgcaagagtcagaaaagcctttagtctcttcacacacttctttagtgcaaagttaacaatattttagggtgttaaaattagcaaaatccaagttctgcagagtttagaaatgcatgtaaaagaggcattaaacctggttttcaactaacttcccacaggcattaaacctggtttttcaactaactcatttgaataaaatcaacaacgaacagtccttttttttttctgttatgttctgatgtatattttactcacactcctagggcacttttaaaggtaagtttggaaagaggtctttctccaccagagtatgaaacagactagaacaaccaatcctacaacctgcagggcagtagccgctccactaattgattctccttctttgtctctaggaactatgcccaggcagaaaaaaagttactgtaggtgatgaagccagtgctccctgaaccaaataaaccctatcgacgttaccgaactgccgggcaaaaccagagcaactcacttacttggaaggtgaaaaacacttcaacatactccaggcggcaaccgacacttaggggccaggcagatgaaacaccatttgtttaaaaagtctattatttcactgtctcttcaacaaaggtggaaaactgatgattaaacactgaataatgccacccacttactaaacctatgattcactaataagcaggttcaatgcaattcataactttaaagaatgaattaccgaagccccttgcttcacaaattcccccaagaaacagaaagagcattcatcacatataacccgacaaccatttttactatggacacctacagatggcttctcttcctctaaggacacaatttccttcacaatcccacatgtaatcatttacaataccagaaacaaactccaactcagttccaccaactgggtttttaaaaatccttgtgcctaagaacgtcttttttccccaaagtaaaatgtgccattaaaaaatatttttaaaacgcaaaagtgcttatcattccgtacttcttttactaccttcagcagccaattattgacgtgataaaaggtagaaactcctggaatgcttcagagatcaacatgtgtcacagactcccagcctgtccgcctctaagacacagttggttcctttgttccttctgactgaacaccaactcctgatcaaaattgggaaactactttggaagggatgggagggtctgcagaatacatccacggaaaccttcataaaacaatattcaatcgtaataaggtggacacagaagaagggagaaaaggcagcctcccggacttccaccgggctcaccctaaatgggggccggcccctggctcctggtaaaatgatggctgaggcctcgggtccgtgagcctcgccatcgggaggggaccgcgagtgcgggcagagcggcccggggtcgggtgggggccgggcgagctgtcccttttcctattcactttcccagccgggtatccagcgagcaaggagcagggaggcacccaggcgaaaggcgccgcccaggatccggctggacagcaggacggagagcggcgaggcgagcggtgcccggggttcgggaccgagagggcaagcgagcgggggcaaccccgacccggccccccgagtccggccccgctcaggggccacgcgacggccgcccccttgcccagaactggcacggacgggcgggccgacccggggccactccacaacttgccggcccgccgccccggccccccgcgagaacccggagactcgaaccaggcagcagaggcaggatttccccggaaacgcgccctccccgccgccccgacgcccccgcggccctgccagccaagcgagagccgacgcgggccgcgctcccgggccgtttccggcggcgccggcggccgctactcctggcgccctggccgcggccgtcactcaccccaggccgccgcggctcccagcctccggctccgtcaggctcggtccgcgaaggcgcctgccgccccgtcctggcccggcgccccggcgagctcttccctccgaccagcggcgctcacggcgcagcggcggacgcgaggccacgggcggacgggcgcgcgcgggtggcgggcgggcgtggggccgggtcgtccctgcgcctcgccgccgcctcctccgccgccgcctcccgagttcggggctctgctgcaatgtctgcgaggctgactttgagcgcctcgctcaccgcccgcccgcagccgcgctcctccctccgccgccgagtccgccgcggcccagtccctcccctcgccgccccacgccattcagctcttcagccaagtttcttaacccttttctccccctccctcccattgtcacccggtcaggaggaagccgcgcggatccgggcggctcacaggagctgcggaaccccctctgtttcgtggatttccttctcgcctgctctccgggtgtcccagacggggctgcaagacccggaggcagcgagaggaccgcgtccccgagagaggggctgcacggcgcgcccgggccgtcccccgggctcccagctctgtccagccgcccgcgaccgctgcaggcgcctggacagctcctcctggggaccggggaaagcgctcttgggacccaggccgaatgctcccgtttgggcacagcctgggggccggggcgccccagacgctccagggtccccgcctgccttaagcgtctacctcctccccttcaccccacaacacgcgctctctgggccccctttcacccacccacccccaatttctatctccttgtaatctgtgtgtcctgctttaatgttggggggcacgggcgcgaactctgggtcactttgaccccacgcccagcacgtagtaggcgcccagcactcgtgtggagcgactctgggaggaaaactaggaaggagacctgaggagcgccccgctcagctccctggacagacgtaggacccaggagcagggttaatcctcggctgctttgtcactgcgaagtctccagcggagtctgtcagccaatctgcatcatccccgggaaggatctgacccaacaagacaagggaaaaggagcagggctgctacttcttcagcagctctcctcggttcggtctccgaataagaaataacaattacatcacgaggccggggcggcagcgcggtggagcctctcggtttcctgcagcctaatctcactgaacccgcctctaaattgggggggccacagattggtgaaacgagaaagtggaaggaggagagagtcatacgaaaccataatttccccttatccttgtatttgctgtttgaaaaatcgtatcctcaacgctccccagacatctcactagaactattaacaccccctcaacacctccccagatgtcaggtttctttttgacttgagcatctagcatttagtaattcgccatgaaaaaaattaccaggggaagcgagtgttgttgctgaaattgtttttgcttgacacaaaaaagctaaagtacagcttagtctcacccgaaattctgaaacggcatgcccgtgttaaaacacttattacataagacaaatgagccgatgaggcactccattcttatatgtaggttttcatatcctgaagaatttgatagcatttggaaatgaagttgctaatgcgcttaaaaaacaaaaactatccaagtcatgaaactgtattctgtgcctgttatgtaatggctgtattgtgtattgcaaatttcacttaacctttaaacaatatgaatgagagttttagaatactgtcacagtcttgaaagtgaaagcaatttttcaaattaatgcttaataaattcagcacccagcacagtgccgggcacatagtgccaatgttttccttagtggcaatggcacattttaaaacaattatttttcatcaccctagtgattgaactatgcaatctgttgccattttatatagttaaacctcatataatataataccatattatttgcatataccacaattcaaaatctgctctaggcaaaataaagtctgctgttttttagtgcatcatttattcagaattgatacaaagcaaaccgtttcaattcaatgatgaccagcataattggagcttggcccttagtggggggtcaaactttttttatgaaaattatttttaaccattatacagatttttctacaatgtattgcaaatgtttctcttaagcagtttgttgaacgtcatttagcattttcttgataattcaatgttaattttattaaaagtaattattgtagtaggttgtagcggattcagtaaatatatccagttcctattctatattctttctaggtgttaggaatgctcccaggaggtacaaaagctatcagtcgctgcaccgaaggactctaggatgctatgacttagtgattatctctgccttttgtaatttctctctctcccccttcactaactgacaatctattgtccttactgttactagcatagctgccactaacattctcctcatcttctgatgggtaacttccagtctagtgcggactgggaatccagatagcctcacttgtcacaattctgtctaaagtaaacttaataggttctgggtaagggactaatgggctcaccaaggagtagggcgcacacacaccttagtgcatagactttgggaaagatatttggactactcaagtctatcttttaaatacattcctcttacttcttaaccaggttttggaccatggagattgcccagcaagccgagaatattccagccctccaacattgttgttaaaaagtccactgctgtatgttaggtgacttcccaaagctgctcactacttcttcttattctgttttctcaaccccacaaaaatccaatcactgaaatcctgaactcttttgatagtggcatgagtgttaagtaaattgcacacctcttgtggaattcattttcacttaatcatgctaattatgtggagacttgtttgttgttgttctttgtttttttaagtaaatcaatacctaaatttcctggctaacagagtcattgcaaggatactagggcattatatgtaatataagaatgcctatttggtaatttgtactttgaagtcaagtctcatttgaatcatttgtgatgtgaaaacaatgctgttgggtttatatacttaaacacctaattattgttttacgtccagggttcctgtgggatcacatgcctttagttcagtctcagtatacctctccgccacaaagatgtagtctgggtgtgttctctagcctttggttctgtagcctttggtgtgttctctaaatctctcctctatagcattttcaaaaaccgttttgttagtgggtatttgcttgtccgtatcccactgtagaatgcaagcagtacaggcacagggtccatatccctctcattcacatttggggacttccagctacccatccctgtgcccagcagacaatagacattcagtagatattggccaacatactgtcataccccagaggacagaatgtatctttctcttggggtcctggctgtgatgtaagggagttcagagaacattttgcagagaaaataatgcttccgctggccattaaaaggttaaaagaattagccatgtaggcaaagtgggaaaagaggttctcaggagaggacatagactgttcaacagtagagaggtatgagaagacaaaaatatgcactgagaagtattgagcccatatttacactatggagtgaactatgacacctgagtagggagaaatatgtgtaatataatagatcacagacaaatggaaccccactgcagttaccttattagccacagtcccttagcctctggagcagcactgaccaataaaaacataaagtgaaccacaaatgtgagccacataaggaatgttaaattttctggtagttatattcaaaagtacagaggaacaggtaaaattaattataataatgcactttaacccaatacatcaaaaattaccatttcatgtctatacaacatacagaattattaattagatattttacaatcttttacagtcttcaaaatccagtgtgtcttttacatttatagcacatcttcatttggactagtcttattccagggctcaacagccacatgtggctaacaactaccatatcaggtagtgcagctccagagaatgtaggaaatatttaataatatagtttaagaaaagtttcttaagaggaaaatctaaatcttgttaactctaaaagcttatgccgattattagtgttgaattatgctaggttataaagaccaccttcttgtgtttagacttttacgccaatttagagaatcagcaaagtttgcattttatgtactgtgtcttcattaacgatgctgtagttacaactacttctatctctattaactatggtggtggactgtaaatgtaaactgtctttatggcagaaataaaacgctatagatttggggttgactaagctttaaaaaaaattctctctacagtatgaagctatctcttctatgcagttactgccaagcatcttcctagctgtagaagtccaggattttgctctctaattcttttatgcccagttacttgtagatgacaaaaaccaccctgacctttgtttgaggcagtcgcctacctgaagctgcagtaaggatttgctgcagctccctgagtaccaagaaaggtctaaagagctgacttgaagatgcttagacaccctctctgcaggttactgtgcagctttccctaatgagattggagcccttttggtttcattgggatttgagtgtggaagactggcaaatccagggcactcattttctacactaaaatgaatcttgaaaactgtatctttttaaaaaaagtctgagaatgattgtgtacaagtagccaaacctgtgcaaggaaaaggcagatactttaatgaaatgcatatgtggttgatgccgtctcattccttctcaaaacaagaaaatgtctagtatagttacagggttagaaaaaccaagaagtcccaacgaagcaaggaaaacctgtcagttttaataatgtgtcagtttgatatgtctaaatgattgagagtaaatatcacatgaaatctttccttttatgtagaaatggcgtatgcagctctcattaggcagtcctgtcgtaaatgcatatgaaagtttcctttaagggatttcacaaacataggaccatgttatgaatcaattcagtaaaaacatgatcctattatttttagagatatatttagatagacttcaactaaagaaaagtgaagaacacatctgtttttccaaataattcagggttctaaagggaagaaagatacaaagaaagcatgatgtatgcttactatttgtataattgtttggctctcaaaagaagacatagacactgacctatctgttttagattagtttaagaaacatgaaaatctcgtgtaatttttcttttcacaaagaatttgaacacacacacacacacacacacacacacaattgcatgcaattcaatggtggaaagaatcatcttttcaacacatggtgctatgatatctacatgcagaagaatgaaattggactccttcacatcatatacaaaaatttactcaaaatgaaatgtagacctaaatgtaagaactaaactattaaactcttagaagaatatattgcagtaaatccttgtgacctctgttaggcaaaaccttcttagctatgacactgaaagcatgaataacaaaaaatagataaattgtactgaagtcaaatttaaaatcttgtgtgtttcaatggataccatcaagaaaatgaaaagataacccatagaataggagaaaatatttgcaaatcatatatcaggtaagggacccatatctagactatataaaaaactcttacaactcaataataaaaaggcaaatacccagtttttaaaatgagcaaagtgtctgcatagacatttctccgaagaagatgtacatcaagcacatgaaaagttactccataggattagccattagggaagtgcaaatcaaaatcacagtgtgatgctacttcacactcaaggcaaatgactataatagaaaaaaaaaagatgaaaacaagtgttggtgagcatgtagagtcattggaacactcaattgttattccttattgatgcatagcaaatcgcttcaaaatttagtggcttaaaacaagaaacacttattatctcatagtttctgggggcaaagaatgcaggaacagcctagctggatggttctgacacaaggtctctcatgtggctgcagtcagggtgttggcagggcctgtggtcatgcgaggcttgcctaggtctggaggatcgaattgcaagaaggcaccctcacatggttgttgacaggaggcctcagattcctgccacatgggcctctcctcaggctgcttgagtatcctcatgatgtggcagctaacttccactagagcaagccgtccaagaaagggcgagagcgaagccacagtgtcctttctgacccggtctcctaattcacacatggttacttccattttattctattaattagaagtgagtccctaagttcattccacactcaaaatggaaagtcatcttgaagggaggagtagcaaataatttgtgaacagattttaaaaccaccacagcacgcaattcacatttttgcctgtggtctgcctctttggtttcctaaaccaacttgcatgtccttgtttccatacactgaacaggctcactgcctccctcaagggaacaagacttaagcgtcttctggttactgcatcaaatctattgcttaagaattctgggtgatatgcagcactcccaggatgccccgatgaggccccttgaaggctggtaaacgggcgtgctttcagccatagcacatttacattttcaaccatgaagaaggaacaagatcattgcaataaatctgtccatttggaaaaggaagaatgaggaacacacattggtcaccgttccatagtaattatcaaaacctactaagcaggagtagccaggactcctttccttggcaatacaggaagttccttgattgaccaacctggtagcctctgattctttctcctgaatgttctccctcgtgccttgccctctgctgttcctggatctgcctttgaagtttcacatttgacagttttcctcaacaaatgtatctgagacagacacgggggaggttgtccttcttggagacctcttggattttgaaatatttcagcacagggattattttaaagttttaacaatgagattattgcaaaccaagttggggatttctttgggatgttaatttcttcagacacttagcaggcttgatttgtttccattccattccatgtacaggttaccatagccaaaagtcttgcccagacatggttttcaaggctgcagattctcagtttttatttactgggctctgtactctgcccatccctctggcccttaaattaatggtgtctaccttgagatcatctgaaataatagctttaggtggggaggcaatacaatttatcacctcttgctaacaatatcactgctgcattatgacaaagcacaagtcttacctcctgctaagccagcagttacatggccacagcttaaaacttcttcaatttcaagtacagagtagatgactttttcaacactgcaaggcccatatcactggactcttcatcagttgttagcaagtatcggcagagaatgtctcccttagaaaatctttgcttccttccacctctgttttcagaatgtttgattctagtctgagttcacctaactcaaaagactttactgaaaatagcaaaactataccaccacctacaaacactatgaatttatcttttatttcccttaacattatggcctcagtcagcaaaaagtctgcttttcaaggtaagcagttggcagcttaaccaaatagtttgctaccacattaaaaacagagccctatcacacactgcccaaatctttctgctaaatcagtggtacttgtaccatgcagcataccattactggtacctactggccatggttcctggttacagaaacaaaatttactcttgctagtttaggcagaatgtgtgtgtgtgtgtgtgtgtgtgtgtttttatataacaaaataattaacaacatttcttctaggacccagaaaccaggcttggataatacatgagagaaacttccagttgcacaaagggactgccgtgtggaaattccactcacctaccatctgccacatggaaccaataaggatacagactaaatactagaaccttcattagaactctacagaataaccatacacttcaaccaaccactttatttgccaagcagccctatagattctgccttacaatgttcatatccggcttccatgtcttatgtaggtgcattttgttggtggagaccaggtcacatgtgaaaccttagcttcatctgagtctgagaaatgccacattcagccttccagtaacctggaaaatatactaggaagagattagagtagtatttagtgtgtgtcattctacagtatctggcacagtggccaaaggtttatttttgagttttcattatattttaactgacatactaaaatttgaggaaagtcatgatgaaatatatagtaaaattaataaatagcatgaattacattgacttactatgtttccttttctctgtaggattcttcttggtttgagcgtttgtattagtcagttttgggtcgctataacagaatacctgaggctgggtaatttataaagaaaaggtgtttatttagctcacaattctgtaggctgggaagtttaagggcatggccctggcttacggagagggctttcatgctgcattataacatggcagaggtcaaaggaaaagcaaaaacgtgtgaagagacaaaacccgaggagcttctcacctttataacaaagcactctcttggggactaattcattcccaggaggactaatccagtcctaccagagggaaaactcactaccaaaagaatggcaccaagctattcaagagggacttgctgccatgagccatacatctcctattaggccctgcttcccagcaccactacactggggatcaaatttctcttctcttctcttctcttctcttctcttctcttctcttctcttctcttctcttctcttctcttctcttctttctctttctttctttctctctttctttctgtccccttccttccttttttttttttttgatacagggtctcactttgtcacccaggatggagtgcaatggcacacggttcactgaagcctcagcctctggggctcaggcaatcctctcacttcagccccacaagtagctaagatacaggcgcatgccaccacaccccgctaacttttttgtattttttgtagagacgaggttttgctacattgcccaagctggtcttgaactcctgggttcaagcgatctgcccaccttagcctcccaaagtgctgggattataagcatgaaccaccttgcctggcctagagatcaaatttcaacatgaattttgatagggacaaacttaaaccatatctaagccatagcagcattcttgctgttgtagtttgtttggcctacctgtctattttaaagccactaataggattccagaaatgtttgatatatatctccatatgcagataaatcaataactgctcagttcatctccacaatttttcatagtcaggtgcatgtctttgttccaggcccttccctggtgaagacacagaagtggaacatggttgtggggcaatagtgaacagtgaagtatggcaataattatgcctgaggatcagagctcttcagtggtgagagaaaaatatcagctggagctaaaagtggcatgaaattaagggagcaggaaaggtcaaatatccagtaagagagcaaaacccaagtttctgaagcacgggaagtattgtagattgtaaaatgaacaataactcacccaatgatcattaaatttgggtaaattttgcattaattgtatttcactgtattctagttcttggaaagcaggctaacactgttaactggtatatcatatattgattttgttgggatacaaaaaatgtgcttactcttggataagtagataaaacacttttggttgtaaggaagagcgacttatgccaattaacttgagagaaaaggaacttctaattcataaaatccaaggaagtgctgtcccatcaatcctcaggagaccatagctcttcatcctggtgctccaccaataatgtgccttttttctccccttattcagtccctattggtccaattctccaaagagaaaatttgattgacttttggccagccagtggactacttcttttatggtcaggtgtccagcccttgtctaaccagtgatactgaatggaggtgagggcaagttcacttaattcaaaggattgacattcccaagcctgtgaatagggctggtaaaactagcagggtaagacgagtgtggtagatcaataaactaatgactccagtacagttattatcttttacaccacataaattaagacttgtaatattgtaacagcatcattaatcttatttacaaaccgcttgcaaattaatgcttgtgattcttatatacaaaatacattaaacatattcattctttcactaattatttactggtgcctacaagtaccctgtggcacagtgtatcaagttctcttgatgccaaatgaacaaaccatggatacattctttgaggcaccacaggaggagacagctaatatttactgtgatgtattttttaatacaggcataaagatgaatattatggggaaatgaggcattggttcatatatgggggattgaagggaaggttccttccttcaaggaaatgatttttgaactagatcatgaatgatgaatttaccagtgtgcttttttcttatggtcattgctgattagtgtttatatacttactataacatcttattatcaagtcatattttacaggtggtatttccctttcgggaagttttgttgattctcaatgtgtcaatatatagagctagaactgtattttgtcaattgaaagtaaattcagattccctcacatggggtaaaattgttttatttttctttcttcttgtaattttctttcccttttcataggcattgaaaaatcgttttctaataacatagctttcatgaacgtgagaatttttcaggtgtctagtagtggtggtgattgtcatttccatagtctcttccttggtatcaaggccagccttaaataatgttgtgaaatgtgccaaccatacctttggtaccaatacatgccctttctctaacacacttttagtgcaatgcccagtaactgcataataacattgtatatttagggaccaaatctttttcctctaatgcaccatcaattgtttcatgtactgttaagaaagaagattggaaccaaccaaataatggcacaatgctttcttatgacatagaattctaattttataactattgaaagggcccttttaaacttatttatacatagatttttaatcctctatcactcatatatataaataaaaggacaatataagtgaatcacattctttaagatattcctaaacatgttcacattgagcttgtcccacaagaatcactttttgacttcatcatcaaggtttatttttaacaaaacgcaatttactcttttgtgccatcaagcagtgttgttgatgcagcatgccttaaaagagtgctccgctactatgtctgtaaatttttttccaagctgctgatctccactgtacaggctttgatgtaaatgcactagcaaatgacacccacagacagtgacacgaagacaccttcccatttccgagatgttaaaatatcaaatgatgaatcaatggcatatgacatacaattaaagagatatgacactacttgataacttccaaagtattagtgcagaccttatgtttctttatcattatcataatgtaagccaagttaggtagtcattggttcttatttcacagacaaagtactggatgtcctccaaattaagtaatctgctcccaatgacacaaagaaaacaaatagtagatttggtactatgcttgatagtactggcatattttatttataatccaaggctttttccaccaattcatgctatttctgccataaaagtaatgcacactaaccaattgcacccttggggcaccccaatttatactatttcccatcatatttcttagatattcataaacctacactgcaactctcaatctctctacctgtcacttatccttgctgattgaaaaatttaatccaacagttcacaaactatgtcccccaaaatactgttgtttcaagattttctgtttttaaatcaagtaacagtcatcttttctcaatttgcaggaaaaattcaactatcaaatggtcttctaaatcaaaatttttccatattttttgtttagtcctagtttctgctatcatttgatgataatagaatcttgtttcatatgatattgaatttacacaaaacatgatcatttttcatttaccacagcaacatttcaaggtattataaaaaattttccacaaatgttacatttcttgaacaaatatgaaaacctttgattttattcattcttctggaagcctgctgtcttccagatacacagatacactaatggttcaaatacacggatctgtgctatttaattggcaagttactttgtcagactcctcagaagagtccttagaaaattcatacagagtgaattgaagattgggaatttgagacacttcataagacaaaggagtcattttttgccagtcagcctttttcaaatttctttaattacataatgtgaacaagatattctaatttcaggacagccttacctgtgaccaacactttttccagctaatttttgggggagtaggtcaatcctgcatcaaagaatcaaatttacagcttctttctacccaggaaagagctgatgcacttaattaatctttccaggaagccaggctgacgctcattatttcaacgcgttgtatgcttaaagcatgtataatttaatcctgtttgaaagataagtgaaagagaattgacataaaatagcaagaaagctctgaagtgaactgagctatataatttgggcataagcattcttaatatcacctttaaaagaacttgaaatatatttgatggtgggagaaattttagtatagatttgaaaactatcaaacagcatctgttgccttctccattttgattaaaacatgctcacagggaaaatagtggtttgtctgttaagtcaaacactaatgaaacatttgctaaaataatctctttaatttggacaacatttggcaataaagtgcactcattggatcatttgcctgtattctgaggcttccgagttaactgagcacagctaagtctaatatggtaatgggctctttgttaaaacctggacatatgcatttctcatgcttggttgtgttctcctctggtgaagagagataagaaacgttattttgatggcattaaaggtttctcattgacatatctaaataccatgagcctgaactgtctcatttcatcatgtctcatttctgtatatcttttgaatcaaaggcactatggccataaggctcaggtgaggaatgaggattagtggtattagtcaagtcaccagaaacagagttagtaattaatctataaaaactgtagaaatgctttttgattagcctatgggagttcatgtgaaacataatattgctggcatgtgaaacaaaataaatccagcaggtaatatcagtagaaaatagaaataacttatcacgacatactattgttttatagaaattagactaagtgttttcaaattcaaattggttcttgtttctaaattactgttttaaattttatgtacgtgtatgtttgcaaatatatgtatacaatacacacacacacacacacacacagcactcttgcactccacacacataatgtgcttcgtgttaacattttctactcatagtcaattaggcaagtaactagtggacatacacacacacaaacacaaagtatacctacagctttgtcttgcatcctgcaaaaccaaagccttagttgtccatgtatacttggaagaactgacctgaaatgcccttccagaagacatatgtgtctagatcattatgttgcaacccttcgttagttttgagtttttgcactattaaaagaagagcaaagtgatcacctttttagtctcttattccattaccatagctcaagatgggcttccttttattctttgtctataaaaatattcttatccacctggagagtcaggccaaataccactctctacataaaacttttcttccggtataatatttctcttatacttctttgttagtatttcatccaggcttgaatatggtcacatttccagatgcccttttctcggttggactgtcaggtcctggaaggcagggacttttgacaaatctgggagcagctaaagaggcagtgtcagtagaggcggcatttgaggcgctgacccatgacaggaggagcacgggctacagccgaggacacactgctagcagccataacggtggcaagtgttgaacaagcagaaaagatgtaatagttgtgaagtcagaggagtagtcagcgacattggcctgggtccttccgtgaggagcagactcgaatgctaaaatacactcccatgcctcttcccacagcactgccaccacctagaattaaatttttgacagtaacagcaatcgcgtgtttttaggatgtattctttattagtaaactttattatttaatattatttctctgggtaaatccttcctcatccctaacactgaattctaggaaaatagtctcccaggaatcttcttagttgagggtaaggaactctagcagattgctattaaacaagtaacatgtaagtgaatatccttacacatcagttcattgttaacagactatttctctccttttaaccaagtattctcagtgattagcacagttccgaccacacatataggtgtcaataaatatttaaatgagtgactaacaataaatagtatttacttggggcttatgcatgttgacatggtacaaaatactttacagatattgtgtcatttaatagtactgttattcctatctgatagataagtaaactggaccttgagagtgtaaataatttgttctaagttgcatagttagtaggtgggaaaattaggatttgaaccaaagaaacctacatgcagtgccataactcttaacctgtatactacattatctcccaatactgaaaacatgcaggaatgaatgactgaatgtcccatacttgataagagacaatcattctctgagttaattgtgcatcaagaataaaaaactaattaggagtacaaagatgcagggcactgcccattcttataaacaatttgttttggtaacagtaactaatttttacttatttttgtacttgggatggaatgcgctatcaattttttaaacattatttttaaacctatctacatgataaaaagaaacttaagatgacaactatttcagcaaagaatgataagtgaagcaccagatgctacatattttcaactgcaaaaatatcatgggaagccagctgtatcttctaaaatttcatgatgtcattgtatggcttcaggatctatttagctgctttataatcttattagcttatctctgcttccagtcatgcactaggccttaattgcataggtttgtttataatattgttagtgttctggtatcatatttcaagcaagaagcatcttgcttacaggctagtgcacaaaaacttgccaccctgagcaaaacctagtgatccattgcaaactgatatcactgtcccatttttctgaagaggtcatcgtttcctggcattgagctatcatgctagtgactcagagttttttattttattcaacttttcccaaaagttcgagtctaggatgatgatttcaaagtgtgatggaagcgaagtgtttcagttcagtgagtttcaatgtcacagtgaaatttaccacgttttccaggaatcagttacactgccagttcgagagagatttcaattatattagggatggaaataattttggatttcttacagttctactcttaatttcactgtcccatctttttgccccccaaatttattcatcattttattgtctccaatctacattcttttacaggttaatattttctcgttacagaattttagataagctattgtcagatattttcttggagatctcatacaaataattgagttgtaccactttcaaaagtttcaaaagtggaaccactggcatttcctgcccaataagagaggatgctcctcatggccctaccagaactaacttgggtcttcatagagaatgggtggcaaattatctccataagacactagctctacctatatctactggttagttgggcaaaaatgagaccatctttctttccctcattgccttctgtgagtaaaacctattaattaagactcttctatgtacaaccaaacaattcaaactggtctggatgtttggggaatgggaattgaactgatttgcttccttaagtgagaagtccaggagtttcagggatggcttcaggtggggctggtgtaggcaagagctccagcagtgccctggttttgcttcttctcagtcctcttggtggtagacttagctctccacccttggtatgttagcatcattctcagcttcattcacagagacaagtggcaggaatctccagcctttaaattccccaaattcctagaccagcagaaaaggacaaatgatattcctcataaggacaatataaaatttccccaaaatcaatgtcactggctttgattggcctgacttggccatgagctcactgggaagcaattactgtggccaggaaagtgtgatgctctgattggccagttctggattacaggccatccctggagtcatggtagtgttttctccacaggggccatgagaaccgaaactggaggagccagttcccaaatagatcagctagatacagttatgagaataggatgaatggatagtggcaactactaaacagcaccatttcagttattcatcctacttattcacacgtttggatattttctctttctctttctagttcttttaacaagcatattaaacactcggtctctgtttttctttgggcctgtttgctttgaagctgtcatcttacatctggcttttttatatttactcttgggtcatgcctacattttgctttgtcctttttacatattattaaattttgttatcattgttttctttggttactgtcctgaaacatctaatttcaacatctgctaatgtattcatttcttcatattatgttgcctggatttggggataaatattgaaaagttgaatgagtggccagttagcatctaagtacccctttacgcagacaatattatttttttgatagcaaaggagaaaagtcagtgttttgtagtaagtagagggcacagatgtgaaagaattaggaatgaaaagaaaaaaataaattaaaaatattgaaacatcttaattactctactcaaccttttcttcataaaacctttttatttgtgcaattaataaccaataaatgtatttgaattttgcctcctctttatgaccatgcccactggagctgttactgagtaggaaaatgattaagaggcaggtggcagaggagcgaaggatgtgaatcaaagaggctagataatgcacaagctcaatagtgagcgctaaataattgatacacaggtgtatacaatacacagacaggacactgatacacatggaaaaacactattgttactaatagtctcaggttagcagctgcctttcaccaataatgactctttataatcaattcttacaataatacagtccatgtttttgagccagcagattctaaaataacttcttctggaagcctttggatatatatttttcacttgataaaatagccattagacaacaatagaatggatactaaaatctgtcatgtatttacttcaacaaaaccatcatatatacctattgttagtagaatgcagtttttgaaacccataatgtctgcatatggtgctacattcaagagacagacaaggcatacagggaaggtaagtctttctctgtccttcagttacccagttctcctttccagaaaattgctgttacctgtttcttatgtatcttactacagacaatgttagcatttgcaaacatgtgtacctctacaaacataaatgaatttttatatacatacctagtaacacattattaagcaccttactttttcacttattaacatatgtcagaaatctctaatggttaaattacaaacaaggatgttgaggaccaggtttctaatataaattctgacattttgaagagtcgtattgtaattgctatgatggtaggcataaaataagccaaaacacccccttggcccccggaataaacatatgaaaagaaatgtaaattcaaattcaaatgagaaaatcattgctacctatcaaataagcaaatgataacaacaatgaaatagttgttatttcaatataaaatcgataatgcctatggccaattgctgaagccagaaacctcagcatcatttctgatttctttctctgcttcatccacatttaatctttcactaaggcctcccatgtcatcctctaaagtatacgtattaaatttctccggaggacatagctgagttgcactcggaaactgtaagataataatatttgctgttttaacccaccatgctttgagctaatttgtttcactatgatatgtaaccaatacacctttaatagcaccttgttttttttagttatggtactttttaaactctgtcattgattgttgtgatatttattatctcgtttataaatgcatacgccagagagtaagaatcttgtgtatttggtccccaaaatacctgtgacatttattatagtcctgaaattcagttgttgaataaaagaataaataaatgaattgatattctggatttactgcctatgggaaaatgtaaactggtgtaagctcattgtctgtaagtgagtttatcacttttgtatcaaagatcttaactttgccaactctttgacccagcaatttcattgttagaaacttatcctggaatatgaaaatttagctagaataaagtttattgtaactgtgtttataatagcagaatagtgtaaacaatgcgtcccacaatagagtattcaattacggcgcatcctatgtatccatgaaaaataatggtatagaaaaatattcattaacacagagcatattcactatatgtggctgagtggtgcaagcaagttacaaatcagaaatataacaataggtcctgtttactgactgtttagtgtatgccattcactgtgatacacaccttacatgtgtgatgtcatatgtatagcatatccagaggggggtgtgtgtgtgtgtgtgtgtgtgtgtgtgtgtgtagattcaaaggcatcagatagctgctttttccaaacactgatctacatacttggaatatgtatatagaaggttatgtcactaaaatgcttacagtgattatctccaaaaggaaaggtgggatttgtattttgctttttgtttctttccctcatttttctacggtgagaaggaacctcaggccaaaatggagagttgccaaatgataagggttacagataccaaacctagaaaaaggagccagagagacaaagagcagaacagtagaccaggggttgggcaggaatccaggacatgcctagaataaggagctattgttaatggttctgctgggatatgctgccacttctctaagataatagggatcctgtaaagtctgggaaagattctgggtagtacctctgctgggcactgacataattaggcatttatgtgctgctcaaactgaatggtctcagtcagctgcagtatggcctggctggagagaaggttgccaggtcagaggagcttttaaagaggtgtctgttctactgagccatgctggtttgtgtgatctggtatcttcttggtgctgactgctcaggactgagaccttctgcaggttgaagcatttgaagaacatagtccatttcacctatgtattctggttggtttggctctcctagtctgcagtgtttagatgccttgtcatcacttgcctgaagacctgactgaaatttggaatcgattgccagaattgtctattccttgagcagtattgatttcaagtgaaacaaagtttctagagatatgggcatggagattttgtttgctaggatgctctttaagtatcagcttcaatggtgatatcaacataagaatcagaattttcaactgttaggatgctataggttcattcatggaccagattactcattttaattcctgagatctttactggggtggtcagagtgaaaaagtacggcatgaaccactgtacgcagaaaatcatagaaattgttaaacatccttgatcatccttcctttccatgatacttgtgtttctagaaattgcacctcaaaacttagtatgttttattggcattagtgcagagatcgtatattcatattatgtttagaactgtcctgatgtttagaattgacgaaatgagctcatgtgtatcaagaagatgtcaacatttatgattctgtttggttcagaatctgtagaatcacctcttgggacacttaatggaattatagtgcattcaaaagtttggaaaactgttgtcaatttgccgtgctctcatatcaaatgtttagcctgcaaagactcaaaagtcagatggagtcagatgatcccaacctctataaagataatcctggtataggtgacgaccctcaaaagaggatctcataatggtttggcagacatggaaaacaaacagatttttccgctctttttcaaaaggggtaccatggggcctaatgagttttcaatacagaatatgtctctatataatcttgagtacctagaaagtgaagatacttgctgaacaggcacttgtatatgggcaaaagaacctgcacagagttgtcctgattcccagtttgtgttaccaggttttccaccttggagtccccaagatattgcctatcacatgggaatggattggttttggagcagttgctaggtctactggatcagtgtttggcaaaagcagttatctgatgcctttcaatctatcaaggatcagaataggatgcaactccactccacctttaattccatagggtgcagaacatttgcctccccccaccacacccccatccagaatataaacaaagcctagcctgctctcttcttcagcgggctgggtggctgttagattgggcccctgcatacaaagatgcccatgatcatagttttaccccttctaccttagacattgcatgcagccagcactctttaacctttcaattttgttatctagagccacagtccttaggtaccaggcataaagactggctatgacctcaggtatcttggaaggctggggagagggtaggtcagcaatgttcagtggttgtggacagaatgggtgatgatgctcacacaggattggcagagatgtttaatccaattgttaatttaagtattatttatgtcaacaacgggttgctaggtaagcattcggtacaagttcttcaaccatttcaggagataataccactcagagtaaattgcatttaaggacaaaagagcaggtcaacagaccccctgaattatatattttaatctgagctcaaactggaagcaaaaaatcatctgtaagtacaagtgtttattttcataaatgtattttttcataaaacacattagtagctaaaagctaacagtttacttataaagctattaaaagttaaataacttttctaagaaaattagtgcatcagaaatagacctgaaactaaacccccaaatatccaatattgagtcttttacctggctagattattgaccatcatacagcttaaatttatcttattgatcgagtaagataaaaggagatgaaatttcctggaaaaaggatgactatttctttagtatcaatatttttatttgacatctgtcaagtcaaacccatacttgtttttagtcattctaagttattaaaaactattgttttatgctatcattttggaaggcaaaaccatcgatctttctggaaaaattacaattaggcatgtttgatcacccttttccatgacccagctctatccatcttggaggtaaaaaaaaaaaaaaaaaaaaaaagctatagaaaagatgtaggtcattattaagaaaaatggttcttcaaagctctattgattgccaaaaaaactattactgtgaaaagagaaatcttcaactactcctaaaataattggctggacatatgttatatgtgacccaatggcacaaaaaagaatttcatttaatcaacaaaatagatctttcacataaaagttggcctctcataatgacatacaataatcaccaattttatagtgggctccaatattaaagaagcccttctgaaagcaattgactttaaagtggtctctgttttaacatcatgagattcacctactgtccaaactaaattgtctcggtcagttgcactgtggactgggtggccagaaagtccccaggttagaagatctttcagagaggtgtctattccaataagccctgttggtttatgtgattgtggcatctgcttggtgccgagtgcccaggatttcatatgcaaattgaacaaaatagatagccacccacaattttttaaatggatttttttttttttaaagagtagattgggatttagaaattattggccacaatctgagaaggccactttttttaccctgggttttttaatctagaaaaatgaggagggaattgaattaataatgtctaattcctttcttacctctaagatgctgtgattttgttaatgcatattaatgcttgttaatatgttactgatgacaatagttcatgtgtgttcatctgttgaggcattttctttctcatccaaggtgagataacttttatcatgactttcagcctgtttcattttatgaataactattttgactcagttttggctaatgtaatctttcacttaaagttggcagaaatgaaaattttgtgaacaaaaattatttcaatgtcaataaaagtaaaataatgtagggcaatagtttttcccttatttacaagaaatttttgaagacatggcatttgtgacccagctgagaattctcctggtttatgtagtgagggagggaagagaggagagatgctatttgctcggaagtaattagcaatctgcaaccactcatcagtgaagaaatgaaactaaagccacctgtcaaaattagaactataaaaatacattaactaccacgaagtattataaacaaatagccagtttaaaataaagtagttgctatattgaaaaatcaggattgtctattattgttcccaagcatatttaaataggtattacacaagtattcccttgattttctcattatcttcaccctgaaattgattctgtgtctataggtggctactggttcaattacttttagtcaaatctctttttatgccatcttgatcattcagtcatgaccagctaatcacattggtaacttattcaacatgaatgactcagtgaaaagaccacaaaatctcaaagtcagctgttttccccatgggtcttccttcatataaacacaggacaaaggtacgctttacatccattcattttaaattaccaaaatgtctctggttttcatgactgcagactatagagtacagatttcaggtaagctagttttctctcagattgccaaagaaatgcaaaattgcctttactattaaattacatttaaccattcaatctatctgtaacttcatttctttcttacatacacatgtttaaagttatttaaagtaatatctgcacaactgatatggtttggctgtgtcctcacccaaatctcatcttgaattgtagttcccataatcctcacgtgtcatggtttcgcccatgctgttctcatgatagtgagtgagttctcacgagatctgatggctttataagtgtctggcatttcccatgctggcacgcactctctcctgtcaccttgagaagaaggttcctgcttctgctttgccttccgccatgattgtaagttttctgaggcctccccagccatgcagaacagtgagtaaattaaatctcttttctttataaattactcagtctcaggtattcctttattgcagcatgagaacagactaatacaacaactgtatacaaattttgggaaaaattaaaaaaaaacaaaatttacttgtaatcataaaataaccattaatattttactttgttttttatcctaacctttttctaacacataaacgtattcacacacatgtaaatacaaacaaacgtctcctatctatcgcatttctctatgcatgtttatctgtttgcatacatggatatgtatgtgcatgtatatgcattgtattacgaatatagtttattatttttcttttactcctttaaaaaaatttcaatacagtgtcatgggcgtgtccctatatttattaagtagtcttcaaaaatctaattatatagtctgtgtaatatcatcaaagtattcacgatatttttaacgtatttattatcgaatattagcatttccatttagaattcacatcatttttgaagactgctccagagttacatatctgataattctgcagccataaccaaatatttacatcctaatcttcatatttattatatttaatggctctattgtctccttaattgtagtcatctggccaggaccagagtgagaggactttctaatgtcatttcattttgatgactctatatatcagtaagaaaacaactcttctttccaagcaaaacgttcttttctctttagtgcccaacaaagaatcttcaatctgcgtatactatacaagagagaagtaagtggattgacccataaaaggaaaaaagaattagcattttcctttactgttacctggtttatagaacattaaaacatctgccaaaggctatgatagtttagtctattttaatatggaagcagtatatatatatatatatatatggttttgtctttttctgcattagaaaaatcaaatgtggtggttcttttctgggactgttgttggaagtttaatccctccctcccctcaagagaaggaaaacgcaatttctcagtttcttatgatctggtatcaagtttaatgaatcatcaggttacattacacaagggttgggaagacatgggaagatgggagttttacacaccattggaagaatataaattggtacaacagctttggaagttaatgatgtctattcgagttaaaggtatacattctttataaccatcaatcctattctcagtcaggtacaaaaggagccaaatatattaatggtgttcatctcagcattgtataataaataatagcaaataataaaaaaattattgcaaataataaataagaaatacaataaaaatagcaaataacaaataacaaaaaattgaaaaaatagcaaaaaataaataatagcaaaatttggagaacctaagtaactacaaatgagagaatagactaattatgatgtgtttgtataatagaattccatacagcagttacaaggtataaactagatgtgtaggcaacaatatggacaaaactaaaaagtcatgatgaatgataacggtaaattgcagaagtatatatgcacaatgattccattcatgtaatgtttaaaaacaatatcacttctggattatggttatccctgaggaggtggggagggaagcacagagggatgggaatagaatgagggatgatataaagaggtgtcaataatatctctaacattctagttcttagaaagaatacaatttcagaagcacatttggcaaaatactaacatttgttatatctgggtggtgggtaaacaaatatgtgttatattcatctctgtagttttctgtatgtttgaaatgttttatgattttaaaatgcttaaatattatttaaaagttctactgtaaatgtcagggagaagagcttaagcatttgttttggggtgccaggggggaaggtaggaaggtggaaattgagaaaacttgggaaatggtggggaaaagctttactgtctgtcacaggaaattggcatctcttcaggaatggagagtacgtatgtactgacactttcatttgtcaaaagccaggtgtgaatggcacggactttgcttagtctttgtctgtctgactatgccaggtggacatctcccatagtgccccaggatggccagaaatagaaaggcccaggttgtttcatgaaaatgctattggaaattacattcttctgggtcctaagacacctattttcaaacctgttaccactggcacacatgcccacacaaagttagcaaagaatataagacaaatgttatttgttggcaaaaaagaagttgctcattttatgcgcaatgttggcaacagtggtaaaactggcactttgctcactacgagtgggattgcaaattgggacaatttgccaataagtgtcatgaatcttaaaagcacaaaactttctgaccctgtgattccttattctaaagaatcagaaatgtgaaggagttgttcacaacagtactattcataatacagacttagaacagcttaaatgtccgacaatattgaaatgaacaaattattgtcattactgcaatacaatggaacattctacaattgttacaaataatagaatactttgcagccattaataattatagtattgggctgggtgtggtggctcatgcctataatcccagtgctttgggaggaaaatgtaggaggatcacttgagaccaggagcttgagagcagcctgggcaacatagtgagaccatcatcctcacaagaaaatgttaacaaatagctaggtgtgatggcatgtacctgtagtgttagctactcaggaggcagaggcaggaggatggcttgagcccaggactttgaggttgcagtgaactgtgatagcaccattgcactttagcctgggtgatggagtgaaaacttgtctcttaaaaaaactagaaggcataatattgaaacatatttatttacacgaggaaaatattcacgatatattttgttcaagaaaaaaatcacaatacaaaatggaatatacataacaatgaaaatttaacaaaatatatttgcatatctatatgtacaaatgacagaggaaatatttcaaaaagttattaccttatgatttttatttattcttcatttatttatattttgcatgtgtcctataataaacatgttttaataaaaaaattcagaagacaattggacactaaaataataaacattttgtagtcctccattcactttcataacagacattttatgtagaaagagaattggtctgggagtccaaatacgagatcttttctttcttataacatttgctttgtatgtctctctggtcccaaaacttgtcatctgtaaaactgagccataatacataccctacctagtgagttaatatgctggattagcaatcagcatatgaaggcctttgaaatctgcgcttatttcttgttttaggcttgctctccttcaaatccctccattgcagcccagtgggctgccttttccatgaacttcattcacctattccttttcctgcaacccacttccaactatgtaaaaagcacagtctcctctttcacagcactcgcctctggtattgcaatatatttttcccatcacatccactagactgtgaactcttgaggttgtttatgttttattctcctttatcccattagtgcctagcacaattcctgacacatcatcagtaaatatttgttgagtgcataagtaaaagagaatatgtattgtaaaagcaatttgcaaactgcaaagtgctgtaaagtaagcattccttatttcatacgtgcaaagatctcaacattaagcatgtattagcaatgcaatgcaatatgtaggaattgagtaacaaactcaagattatcatgagcatttgtaaatttgtaaatttgactaaatcttctggaggtgtttaaatgaacaggaaattttcctaggctacactacaaggaaaagtcaaaaaaacaatatttttgagatatggttaaaaagaaacccactaggatccaatatgaatagcatataatatgaagtatttagatagagatgagcaatatcaatactacttagtgagaaaggcttagctggcaccaccgtcatgatatcatggttgttaagcatcctcacagtacaggagtacagattataggaagccacagaatagggtcattggtgccagtctactgttatgaaagctaatataacatggggatatactactaagcataacatcctgcagtggccagcaaaccatctagaagctaaaactaagccaggtccacagaaggctttgtcccatttggggctctatattttttaagtgatttggaaagttggaaatgaaccagggaagagcaacaaaaataattagcgttggcaaatggacctatggggaacaaaagggaaaagaacttggaattatttgagctgaagaagaaattgctgcagggtgacctcataatcactttcaacggataaaagggtatcataaggataataggtgctggggtttgagggagccgattcattatttctctcctgacttctggtttccaaatttctagaaccaaattcaaaacaggtcaaagcaaccaggtgagaaatcaaggatataatcaactttccttccccaaagagtcatggtttctatgtcagagggtacaacttgggcctgagatccaagtaaggtttcctgttactttgcttatttccttttctccactcacagctctgcttctgctactctactccacagatcttaatacaggacccaatcaaggagagagctgggtctagcaggtgagatgcttacccactggcccgtgcatgcttgtagtctgcctcacatgtggttcaaggaatagagagaaccaagagagcagctcaggaacaagcagtgattttgccccagtcttaacaataaggaaagtagtgacaaagacagagagagataagaagtgagcttcttccacagcagaggagctcagctgttttgctgtctacagaaataataggcagctgtgtaacaagcatcacactccctccaaaacaacaggatccgggggatctccattttctcagtcataaaccagttttccaaaaggaagatttctcttgaaaacaaaactaatgctgaatgtttctgagagaatgacatagctctccgaaggacaatttaaaatttcctgcggagagttctggcaattacaatcataggaccaacattgttcaaagtggttccatggaatgttaacagggatcacatggaaaatagggctctgcggtcaaatccttttgtgaaacacgaggttaaaccaagttaaatcattttctatactaaaggtcataataaaactttaaatattataatatttattgtgaagctccatgttttccagaatctttcttctttttggcagagtatctcatttggcttgtgtttcgtaaaatatactttggaaaaatgtagccttagatggtttcattcacttaacatggagacagaaaagttggatctcatctacaagcctcttctagctctactatttcactactaagtttggtgcagtgactcattagaaactgtaatcaccacgtttcaccaagcttaaacctccaagtgattggtgcaacttttttaatgggaatgagacttggactcagcagactacatctcactgggagacaatacagccttgtattaacagcttatactgacgaaaccatgaaaaaacacaatcacatttatttacaattttttaatttgtttatctgtacttagcagcaacatggttgtttctcggaaggtcagagtagggtgctcatgaacttaagtttaatattgggcattgttactttatttttggccatttacgattgtactatgcctttacttaggaggggcacacagcaagagtgtggacagaacacaggaaactcatggttgcttgtgcgtaacaaataacattatggcttttcttatagtaacatcacaccacgctagagaagaaaaaagattatctctcagaagaaaaggatatcattaacccaaaagggcctgtggtatcttctgttttgtgttaaataaaagccttatgtcaattttcagattctgaaaatgttccctttaaagttttctgttcttatggataataatgaagtggcatctgaaacaacatactccattcagttcggtgctttggcaggaagtagctgaaagaaattgcttccataggcagagaaacctgctgaggctgcaggacaattgtggaaggaggactctctcagctgctttaagggttttgcagcttggttggttagtccagaagatggtaattaaaagatcccttcaagggaaagaatagcttcaagaaaagcaagattcatgagtaaattaggagagcttcaggattcaggtgccacatgctgtatgtagctaggagtgcaggctcttctgtgactcaggcacacctgagtgcttcagaggcaaaccagtctcattttatttctggtgcagaactccaagtttcttaaaagttactccactgtcagcgtatgtgtgtaccaccttttgcaagagagcatggagaaagagagagcgtattgtatttccagctctgatgtacttgtcttagctatattgttttaaatctggcatttagactgaatatttatcagccacgttgttagttatgtcagtaagagagtgggtatgaagcccatcttgaatgaaatgatgagaatgaggcatctgacggataaatgaaaattcaagtgtgattataggcacaggaacaagcagtggttttgccccaatcttaacaataagaaaagtagtaacaaagacaaagagagagagataagaagtgagcttcttccccagaagaggagctcaactgttttgctgttgataatgaaattaaatgaaaattcaagtgtgattataggcacagattgtcatttatttcacagataaacaaaaattcaagtatgattataggcccaggtaaaggctggccacacattgctaggagctgagatagccagatctgtgatctgaagtttgccagtacaaacagagctaaatatacacatatttctcttgcccgtataaccctcaagccttcacctactttgctgagaaacttaatactttcaaacaaagctatagacctgaagcataacccatgtctacacaaatactaaactttctacagaactagaattcatctagttaccaatgacctggaataaatgaaaagaactgggtcatgcaatgtcttctacacagtctatttgcaacaaactgacagtaccgaagaccaccaggctgggaatggatcaaggaaatattcaccgcttattctaggacttcgaggaaagaaattatttttctgttgtactacaaatacatagtcagataaataagaaatataatgttaaaaacagcaaataatcctttacttcccaaaagcgttgtaatctattcatgactactggtacagagcaagtctccacagccaagggaagcgaaaatcattttcacccaaacaagctgtcccaataggagggtttgcagggccctcagtgaacgaataaacgtagttgaaaagacagcaattggccaatggtgccatgtgtaaggagtgatgagaacacaagataacatcaagaaagacaaacataggaatcacagtatccttcaggctcatcaaataaccatcactgtgggtcttaatggtaatgtaaaattaaggtggcccagagaaaactatgtaaaggaaatgagtaggcattttacagattagaaaatctaaatgaccaacaaatttgggaaaatatatttcatgaaccaaattagtagtaagggagataacatcatcaaattataaaaacaaatggtttacggccagttgccagttgggttgtgggaaaaaggacacccttagacattgctgtagacatgtgaactgcttcggttatcttgggaaacactttggcactatcaattcacatcaaacatatttgtttttagacctacgtgtatgaacttctcactcagtaatcctactttgagacactttgctgtatgaacttcttactcaataatcctactttgagacagtttgctataaaaatgaaagcactggccaggagtagtggctgatgcctgtaatcccagcactttgggaggccgaggcgagatcgcttgagccaggagttcgagaccagcctggccaatatggcaaaaccccgtctatactaataatacaaaaattagctgggtgtggtgctgccagcctgtaatcccagctacttgggaggctgcagggggacatcacttgaaccagggaggtagaggttgcagtgagtcgagattgtgccactgcactgcagcctgagcgacaacgtgaaattgtgtctcaaaataaataaataaatacaataaaataaaaatgaaatgaaagcaccaacatataaaggtattgattgcatcattgtttttggtagcaagtgagcatgtttatatacttgcaagtatatacatttgcaaatgtttaattaagagaaagatgtggaaaaaaggaagaaggaaaagggaggggaggtaaataatatctaaaaataaaatttttcatgaaatttaaaaaaatcatgtgactatgatcatatttaaataataccatatagataggtctatataaacacagaaatgttaggagatggttaccgaaatgttcatgggtttccaagaggtgcaaccttaggtaaatttttttctttttctcacgtttttgttttttgtttttttttttacaatcagcacattatttttacatcagaagaacagagaaaggtatgtttttgattagctaaaaattttaacataaaattctaatattgtgtctataacatgttttacatggattagtatgaattgtgcaaattaccaatgaaggcagtggaagagggcctggggagaggagtgttttagccagagtttgcattctttttatttcctgcactctggatctattcaaatctcgtctcctgccgagggattcagtgcagaactaaaatatgatgacttacttggcaacagcaaaaaaaagagcatttactcaaatgcaataaagataagcaataagtttcagtgatgcatatagtatgttctctgctcgcctgcttgttctttcttctctcagcagaagttcaactgaaaataagctcaaacagcaatttgccaaattagctagtcacctcacttgtgaccaaatcacatcctacagagatgctgaaccccaagtttttgctctctggaatatacataatttgaagagtcttttcacttagtaaatgaaggggtaacctggtaagttcaagttactttgaaatgagatgtacaaataatacttgggtataatatccacagataattcccaagttattgctccccaatctaccacccttccaaaaacagccatgcaaaaaatatacatttttccctttctctgtcctttcccaacctcacaaggaagtaaactgataaatgcttattgaaatcctaaaaagcaaattgcaggaaaaaaatttaaaaagagaacataacttagataaagcagtggatagataattaagaatttgatatatgatgccatcaacttttacccaacagagactaaggatatttctcttttgtttacgtgcttcttctctctttctgattaatcccctggctgacagtgttttgccactctaaatagctctgaaccaatctccatgcacagaagtcactctctgtagaagtctggggcattctgattggccagcatgaacccatgtgtcaaccctttggcagaagagactgtgcctgtaagctgtgccatcagggagatgggcagctcccaaaaagaaaaaaaaagcgctatgcaaatcaaaagtattagctgttccctgtgtcgaagtatacttgagaagtaattttctaggtgttaccacaagtgtaataactttcttattctatcttttagcatatttgacaagtacaaacaatatataaatgcaaaagaattgattcttttcatagggattcagagtgaagttttatcccatgcccttattttgaaaagtgatttctagtggtaatccctattgttattcttgttggccactgatagcacagccatctatcttcagaagggttgacacttgatttttataataaatggtctttgtattatgctgttaggaaaatcaaaatattgccctttagtactcctatttatggattaaaattctcctataagatttctgtccatgtgaacacaaaaatgtcctttctttttgaaaatccatcccagcaattagaacagtcatcctttccagatatcaagccacccatcagacggcctgtattagttactactgctgtgtaacaaattatcataatcgtaacagcttaaaacaattcctatctattatctcacatttataaagctcagtagtccaggtagactctgttaggttctctgtttggttggtttccaaagctgaaatcaaggtgttgactggcttggctgttacgtggagcttttgggcaagaatccacttccaagctcatgcaggttgctgacaaaatctagttcttgtggttgtgggactcaggtctccatttctccagttctcttttcagctgggagctactctagttccttgagactgttccagattttttctcatgtgcttccctccatcacagagccagcaatgctgcaatgagttagttctcgtgttttgaatctctctgacctttttaagtgccacttcttggagaaagtgctttagttttaagggctcatgtggttagatcaagcctacccagatcatctcccttccttgtcaactgtgccatataatatagcataatcatgggagtgaatactcattgcctttctagagatgaagacagggtatctttggggaccattttagatattctgcttatcacctgcctactactactactactactactactactacaagccagcattgattcagtgcttgttaagtgcttgctaggtgctttgtatggattatcttatttaacatctatagtatttttaaagtgggtgctgttgtgagttccatgtttggataaggaatcaggcttagggcaattaagtccttgtccaagatgacaagccagcaggaagtggtaccaggatatgaacccaggcctggctctcaggattttactcttaattgcctcccttgttggtcattgtatctttgatctcccaagagtaacctttaaaattatcaaattataaacttacataaaaatgtcaattacattttgttaatatgtaatgttattattattagttatattatctcatatggacaaatataatagatttaaatagttgtaaaccccaaaatttattttgtcattttcaataataagtaaaatttgccatattttcaatgcaaaggagaaggtgttgttatctttatgacatgcatttttgaactgtgtttctattagaaatgattatttgcatccatccaaggccatgattggcaaaatatctttgtgtatgcattattaaaggcaccacatttgacctatggacagatcattcagagcaagagggcctctctgggtggatgaattagaaaaaggcaacttgccttctgggctgacacttggatagtaaaatgtggatggctttcaccacctgctacatacctttggtaggctgcctcatgcatgcaaagacactctgagctgtgcatattctccaaacttcaccttgcaaacaacagcactcatttacaaaacttagatacatgatgcagtgtcttgccgtgagcctaaaagttttggtcattgcaggatccaatgtccacttacttccattagatcaaatactaagaagactggcccaagataccaacgaaaatgtttcacaaattaaactgtagctaatgaaatgaattttatggctatcagtttaggaagacttttgtgctgtatctttgattagacttcacattaatattttccattttattatataaatatagaaaaacagagatgggaaaaaacaaaactactcctttgaggacttctaaattgcccagtttacattttcataaccaagactaagaattaaaacccaaaagacaggaataaaagatttactgttatacaagtccagtattataaacactgtcattcaaaagttgggctgctttttttgcatttaatgaggaatttatgaattctcatacaccattcatctttcactaagcactcttttgagtactaaaacatttgtttgaatgtggcgtattgacatatgaggcagtaataacaaaacaaacacataaacaaatcctcgaacttgaaaaagtcattgcctccaaaaacacatctcttttcttcaacaccctcagtttgtgactttcatttatggtgtttttcttttaatctcaaacttcactattaacagttatacatatggtgtatgagtcctctggggcctaggtcaacatccaggccaacagattggtccacctgtcccgtgggccacaacaaaaactcagtgctttctcacaacattcagtgcttacacctacttttaaatagatgctttaatttgagttcaagctctttccacgctaaccttttagtgacatgaaaatttctgatttgatttttaaattttgtttattttatagttactctttagaggcatgtgattcattatttcttattgattacattttaaaataccataacaggctgggcgcggtggctcatgcctgtaatcccagcgctttgggaggccgaggtgggcggatcacgaggtcaggagatcgagaccatcctggctaacacggtgaaaccccgtctctactaaaaatacaaaaaattaaccaggcgtggtggtgggcacctgtagtcccagctacttgggaggctgaggcaggagaatggtgtgaacccgggaggtggagcttgcagtgagctgagatggcaccactgcactccagcctgggcgacagagcgagactccgcctcaaaaacaaaaacaaaaacaaaaacaaaaaaaacccacagatgacactatcagccaaagctatttcactgcttactcattaaacagacccaacactgaaacaatgccaaggattcatccattcaaatagaaggcacccaacatatcattttagggttaaaaagcacacaattgattaattagaaatcttagttaggaggagtttgtatcctagacttgacaggtaaaacaagctgttatcaacaatttattttttaagcccctccagtgaggccatttcagtcatatactgtgatcagtccatagttagattaatcttccgcaccttcatttgttgcggtaggtgttcaatacatattgttgctcagaatagtgatgcaaaagtgctgccaactaagcacaatcaaagaaaggctcaaggatccatgagtccagagagtaaacaaagtggaataacccattatatgagcatctcacttgatgaagaggtcaaattcgttgattgttttcctttagaccaggtgaagtgaaaattttgcagatttccaagcaataaacatcttagccaagagccactggactcatttagattatgtatctacgctgatttaattcatcaactaaatgccagttatccacattgtactatatgtggttgtgagctcgatcttcagtgtataaggtgcattccttatgtcattcatcggcctttaagagacagaaggtagtggaaacagggtataatacaattttcctttctccttttcttagcatgggttttcctgtctttttttttatcctagaaaacacttcaggaaactttctccagattatacattacattttctaaggctgtaaaggggaaaactggtgaaaacgaaatcaatttgttatagcttttggttttcatactaaactggcaaaaagagaaatgagagacatcactgtacaacctaaattgaagatcacactaatatttggataactcaagagtgattactggtaggccaatgtttctaaatccagtgagaaattatgcaatttcttgctttcttattttaaagctctgtgaactcaggtttatgaaattatgctaggtcatcattgcgcttatgaatacgttgtttttgtttattgttgcatttaggattctttttaaaagtccacaagttgatttattatatgtcataaaaaattaaactctaaaaagaaaatcggcaaactgatatgaatctctcaggatagaaaaagtgtgatgtggaattgagctgtgacttgaaaaagtatcaggtaggaagcactgaagctaattattaagccaacaggtaagaccaggttccaaaatgaatagacagtgttttttaaatagcaaaaaaaaaaaaaagtatgttgaatataattgtttgggcttgagtggatagttatttttctttcatacagagagaaagtagaacaccaaaattaaaaaaggaaaagatatactgacagtaagagggttacggatgctaccaaaagattattgaaaagttgacttagatggtatgtagtgaggtaaataacataaaggaatttgttgcagaaaaaatatatagcatttgtggtttctgggttttgtcaccaaatcattttattttcaagaaagattccactaaacgattattctatttcattatgtagcctgcaagtgaccagggattaaaacaaaagaaaaaaaaatacgtgttgaaaaatatgtagtaatgtcaggtgcaagtttagatttggttttgacagtcaagtccaaagctaatcagttatctcaatattagaccaagcatgcagatataaccggtatggaaaaaaattaactacagtcatgattccaagcagcttactttgatgacacataagtgggcaatattaaaaaaaaaatcacttcaaaggaaattttcctatattaattatcaattgtaaaggtgagaaaattttaattctgtctggtgtttagaaaaatgttaagaaatttaaaaagcatgacagcaatcgtttttgcacacgactctaccactttcttttttcttattgttagtttatttatttatttacttctcttattgtttggggattgtcaaaattacagtggttacaccaccgccgcttctgacagatggaacacagcttgtttgtctgacataatggtcactgggaaaggatcaccctaaagatagcagagaaacctggagctcaggcttgagtctgactgctagacatcatagctgtgtgaattctgggaaagtctgaaaaatcttctgtgcctcagtttgctcatctctaaaatgggaatagtaattgtacatacacttagggttaatgagatgattaaataaattaagatataaaaagcacttaaagagcttggtacctagaaagtgatatatgtgttgttacctattattacggttattaatatgacaaaagaatttgagaaagccactaaatttccactttaaaatgtggataatataatattaatagctttgtatacgagctccctacaatgcaacgaaagcaaaattaattatggatgaattccaatgaagctaagaactccaaaccaatgcaaatgtaggttccccctaatttagaaattcctctttcacatggacttaccagcgatctctcactcatttactcactcaacaaatatctattgaccacctaatatatgccaggggatataatagtgaataaacattacctgaaagaacgggtcttttaatcaatcggtaggtaatatttttccatggagcatgtggttcttgaggacaaatctgtccagctttcgttaatgtgggtctcatgaaactgcgagggtgcaagtgcctgaaaaccgaaaactaaagttatcaatgtgcaggcaaaggctgccccaagggcagtgggaggaggtcaaaggtgaacttgcttaaaatgtgctcaggcctgtaatatattaatagatgggaatacacttttcctttttcaccccctcttcttcctcttccctcttcatcccggaacccaaaccacatttatgtaaaatgattcccgtgattctgttcgaggtggactaaataggcatccacagactgcgtgagggccctaacgatgacatagaacattatctctattataagtgttaatactctaaacaaacctactggcaaataaaattttagagcacaatccatttgttggagtctgtatttttattattgctgtgataattttctggctctgataatgagtgccatgaatgcagtagagcagatgttgaaatttcgttttctttttgtatccgacgcttactttttcctgggtagttattacataggttaaagctagtaactttgttttccatagtaagttccaaaacaacttaaaggagagcaaaagggacagatgggtggtttatatttgaaaatagattaatttgcttgaatagtatgtgccttcaaattggagtgatgaggtttgcatataatcgaaagcagagaataaaacagaggaatatagtctattcctttctccttaatttgctaccacagtgggtcagtacatggcaatactttcaaatgtaatctttgtcacattcagaagaaaaatgccaaggaacaatgaaacataaagggatattttttattccaggaggaaaaagaattttctggaaaatcttaattggcaaatttttatttttattattattttttgttgatagagacggggtttcaccatcttgcgcaggctggtcttgaactcctggtctaaagtaatccacccaccttggccctccaaagtgctgggattataggcctgagccacggcgcctggccagcaaatttgttttgattcaacaatgttgtaactctaactttagcctttaccaggttctactactgtctgaaatgactatgcaagtagttggaaataaaaatattgtacaattctcataaacaaaacaaatatatatcacaaaatgctcagttgatgatgttaaaataatgatatctgagaaagcagtagtatgtaatggccattgttatctaattactctaaaccaccaataaagtaaaataaaatcttcctatttaagaacttactttaaaaatattttgatgccctccttgacttcggcttcctatagaatttccccaggtctgtttggcatttggtttctgctactagccttatcctcactatgtatctttgaactaatttcgtgaaagagactgagatcacatactggtctttttgtgtgcctgcttccagaacatgcacattagcattgcaaaactttgcatgtccagatgtctcctagacttctcatttgatttgtggctgaagggtcggaaaaattgcagaaatgagctgccatgttcccacgtttcctgttcttctggtgtctgatgggggagtgtggacagtgagatggattagataaccaccacctctattcaaaaatatcttctctgccctgttttagggaattatgcttttcactactttaatcagtgtagtcagattcttcctgctataggtttacttgaacacggaggaattggagatgggagaaaaggaaggagggagaagtgtgtgtgtgtgtgtgtgtgtgtgtgtgtgtgtgtgtgtgtgaagggagagagaacatgaatgcatggcacagtgaaggtatttaacagccagaggaaagtattaaagaataaaatattttgagttgatagatgtaggttccacaagaagataggagagaagttgaaaagaaaaaggaaaccattagactatcaatgatcacttgtttctttgatgctttatctaggcctccgtggcagtaacagccactgaaaaccagactcccaagtagctttacatgaaatgtcctcatgatcaaacttgttctaatgtgtgttattggggaaataccccagagaacagagaagatggatgtagactgcattttaccagtgccaaataaagcagtcaaaatgttcttgacaagatggaaataatcaaataaccacctttgattgattttaaatgaactgactgtcttgcatggtgcgcattaatatttatactctgtggttccagacatctgtataaatgtgatgaactacttattagctatgtgctgactttctccatgatctcatcttcatattccaactaaaatttctccacctatgacttacagaaatgcttgctcatgtgctctgtcattcttggtctttatttcaacaaaaattgactgggcacctactgtgttttagagaattcaccaggcgctaatgacacagtggtgaacacaaaggtgtgccttttaaaatttagtctggggagggcaggttaaatcttatgttacaccagtggaattatgtaatagccattgtgatggaccagaagaagaaatgtgaagtaccttgagaacatacagcagtggcaaacaaagttaatttggggagacaaggaatacttttctggcaagggtcaaagggtgaggcaagggactgatggtccgagcagaggggaaaacatgggtgaagaccctgatgcattaagataaaaacagttaattttgaaataagtatcaacttatagggaatgacaaaaatagcacatagagtgctgtaaactcttcaccagtttctccaaatggtggcatcttctatgactatggtataatatcaaaaccagaaagttgacattgatacaatactagtaactagaccacagtcttacacagttttgatcagcttttacatgcaatgtgcttgtgtgtgtgtgtgtgtgtgtgtgtgtgtgtgtgcatgtgcgtgtgtttttatagttctatacagtttgacctcttgtagaggttcatataaccaccactacaatcagggtacagaactgtttcatcactacaaaagatctcccttgtgctttttttttttttggagaagcaccaacccctcattcttgtccctatcccccagtaaccacgaatctgttctctatcatagagatggattcttgtcatttggagaatgttatatcaatggaatcacacagtatgccaccttttgagactggcttttttcactaagcataatgtccttgagacccatccaagttgttgtgtattatcaatagtttgttccttttttattgctgagtggtattccattgcatgggtgccttcgtgtttaactcatttctggacacttgggctacttttggtttagggctattacagttaaagctgacattaacacttttgtaccctaatgcattttaaggaatgggaaaaaagacacacaaaatgaggcttgctgggggccaaattatgcaaagccacaaatcctttctgggtgtacactataaaagtacaaaaatgaatgaataaataagaggaaactgaatgtaaacacggagtgttttaaggactctgacttttggtgttatatcagtatccagatggctgccttttattttccattttttaatctaactgtttgcacataatgaggtggtcagatttgaatactagtttgcagatggattgggggtactctatacttgagacagctaattaaaacataattctaaaaacaggcttgtaaaaactttcttccctctgttcactcagaaaagacttatatttagcataagaatgttattggaagcaccaaattgaaaactgtcagctcagattctgcaatctaaggaagattctgcctactggtgtgttgatgaagaacgtagaaaaacaaatcaagaaaaacagcatgagtgtactgggttttctttaaatcagcagacatatagcataacgggctgtgagaattctgatccaagtcacaggtctgccacccaatgcaaggtgtgagttccacgttacgtgaagtgaaagggggaaaccaccaaggcgattttagaataaaatcagccctatccgatttaacccagcttatcaatacagtttttcctacaggatattatactcatttgaacctctgggcctctgcctatgttttcctgttcctagtttgctgtctcagttcctttttgccaatcagaatcctataaatccttcaaggtataatctagagcttattcttctttgaaacttgccctcacgctgatacatttcttgactgatttcctgtcatagagctagggtagtacagctaagggtaccctaggtagtacagtacccttaatacttattggctgtgcaattattgcattccttaatcatagatgtccaagcaaatttcttccacttaaatgtaaaagtaaaataacaaaatataaagcttgaaaagtggggggtggtggtggggtggaaaaacacataatatcattacccatatattttcttccaaaaactcttcaatgtaataaatatgctcaatccttagagggttcaggtgaaataaacatggcaatacagtcttgataggtattttaattgagactaatctttgaagaaagccattcggactcttaaaagaaagatttttttttttttttttttttttttgagatggtgtgttactgtgtcacccaggctggagtgcagtggcgcaatctctgctcactggagcccccatctcctgggctcaaatgattctcctgcctcagcctcctgagtagctgggaccacaggtgtgtgccaccacacctggctaatttttgaattttcagtagagatggggttttaccatattggccaggctggtctcgaactcctgaccttgagcgatctgcctgccttggtcatccaaagtgctgggcttacaggtgtgagccaccgcacccagcctcttaaaagttttatatatccttggaaccaataagcccacttctagggatctctgctaaaatattcactagagatgtagacaaaaagttacatacaggattattctttgctgcattatttatgagatagaaaaatggaaatgatctgaagaggaatttaataaattaataaatttctttgcaggcattaaaattaaatattgagggaatatttaacaacatcagaaaatactcatgttgtaataaaaaatgggaatgcagaagacccgcaacagttcttaccctgtttaaatcagactgtcgaatcctggcttttttctgttccttctcccttcctgcatctgttagtatttttgcaataaactgtttgcatgtgggaaaatgggggattgttttggaaatttacatcctgggctccaaatctaatggagacttatgattaatttctaataattagaacaaaatacattgaataccaaatacctgtaaatctaaaaactagaaagaacagcagttaatgttttatcagctatataacccaattattactgtgctagttagaagagatttccactggtaaagtaataaattagccagttttattgtactagggtcaacatcatattgtatataaagctgcattattcctgcatttcctgcatgttgccttgaaaatcatggtgtatctgtaattgttatagctcacgtacttcctggacacagttttctcacattagaaagtctttttagctttctggatctctgtcttcttaactgtgaaatgaacataagtggcttgtcatcctccaatggctatttatgtgtttgttgagttcataagatgtaagtttttaataatatattaaaaatttgaagcatatgacctctaaggacctttcaagatatattttttgactgtgagacttcatggcatataatttgtctcctgctgtattgcatatccttttgtaattggtgacatgtcttctgctgaactccctccaggttgttttagtgagcaaaaatgcttgtggataaaatgagatcctatcaggctggcaaagttttaagagtttgagagcgttcagtgttgcaaagcatgtgaggaaacaggcattgtcaaatactgttggtgggaatggaaattggttcaactcttttggaaggcaattaggtaataatataccgaaatttaaaatgcatatagcctctctttagccattctactgctgaaaatatcccacaattatacttgtaatgtgaacagatttatgtataaggatgttctttgtaacattctttataatagagaaaaataattgcaacttaaaatggatactagatgcataaactgtggtgtggccatgtaatggaaaactatttagtcattcaaaagaaataattaggtctgtatgtactgaaatggaaagatgtctaagatattatggtaagtgaaaataacaaattgaagaacaatttgtacggagtgagcttgagtgaaaagcaatgcgtgttcacctagatccgaatagaaaaagatggactccttttacatctttcttacactgttttctcagtctatgtctgagagaatcatggagcctcagatgataattctacacactgctatgatgaaatacaatacaaaacaaaaacgtttctccagagaccattaaaaaatgtaaggtagagtctacattgctctagaaaaccgtgaaggtatgaataagttttcgttgacagttgggaagcaaagcagtgatatgaatacctactatataggtatttctgtatagtatacctatatttctacctacatttctatataggtatacctactatataggtatttctatataacatagaaagaattggaggtatagcccatctgaatatatacagattccatttgttaggaagtcgatatagaaaaatccagaatttcttactataatttaagagatgattgacctccaaaaagcttcaccacagtatcaactctatgcttcatatattttctttaattcataagcagtacattttattcgtggcataatcacttcttcctatattccaaatgctttcttttctttgtttcctatcattttacatataatatgcaaatactctaaaattgaaatatagcttggcagtttgtaatactgtaaaaccataaagtgtaatatatgactacaaaatattttggtttaatgggcctggtgttctactatatatttattttaagtcactcttaaaatgtcaaataaaactcaaaaatctgttttagttccaaatgtagagctattaattttatggcttaatatctgattaaatttaactatgcttctaagagcatataggttccactcattagatgggctgactgtttaatcccatcattttaagtggaattgaaccccatcttgccaaatatgctaatatcctgagggagggagagagggaagaatggaacaacagaagatgtttgaaggcactgtgaatttatgttcttcacttgggaggctaaccaaaacatttcaatacctccagtattcacattctggagtagagaatataaaagtcaaaagagaaatgttttcagtgatttctgtggtatcaataaacctatataaatgtgaatagacttaaataaatagttaaaacagaatgtctgggtacccaggtatataggctgccagctgggccctgaggctgtatcacttctatttcccaattgctagcttttgaggtaacagcactcttcatctgagaagaagggcactgacaaccgtactctcatgattctcaagaatcctgctgacttgttcattaaacagaactggcaactgactcctaagataaaaattcttgacagctttccaagcagaaggaaggatgctgagtgacacatataaatatataagtgagaaggaagggtgagctccaatggcagtgacgttttccggagcagtttatggaagaggtaatcgttgtaagacactacattgcattctggagaatttgttcaccactgagcaacaggtgagacctccctaccagaatatccaaaatgaattttagatatcatttaaaacttttgaaaatagtgtggtcttagaaatggctcactctactggactacttgcatatgttcttttttttagttcaactactagcttcatctgtactacagagactttgggaaaatttcttgaagacccttttttaatgggaataaccacttccattattttatctctgggtattctgtgagtatctgttgtctcaataagtatttctatatcgtgtatgttatgtatattaaaaaaaacccttgagttcttcagatgaaatctataatgcaaataaatgacattcaaaatttagctattctaaagatattaacttctaaggtaatggtaactttaactaaggttaaacgtaacttctaagcagtgactaccatttttctatttttttcagaataaattcatctcaaaatctacattacaataaattatctcaataatccattttcctatttttgattcaattacataattaaaaaacattttagttagacatttgaagagagaaaaaatattgtaataaaccctatgtcttctcaggttttaaaaaatcaatatgaattgttagtattaaaaatgtttggaatgcgtactttgaaataaaatttttgaaaaaagtattgacatgtaatgtttaaaagtcaaactttctgtggaagtaacattaacatccataatcaatcattaatactatgatagtgagccttatttttatttaacaacatttaatcgttgttgtctgccaccaaattctgcattttagctcttttcactaaacattactatgtttttaataaaagcattatagtttggttactagtaattgtcataattttattatctttccaataggtatatatcatatgtaaaaaaaaacatgtctttgaaataatctcatttctgaaagataatttaaaatgatttctaattgcttttgcaaattcaaatgttttcaataaaagttttcattaaaatacgttaataaaagatttttcttgtataacttaaaaaaggagcaataattatgttgtatgtttcaactccttttgacaatggttctcataaactcttccatgtttctctaagtatagaaaataactggcttaataaattaaattttaaatgatcctaatggagcatttacataaccttaaaatgactataacagagccaaaaagtaattaaaacttcataaatgcagagtgacatcatccaatcggcaatttacatttgtgtagttcaaagtaagaggacctgggaaagccctaattcacatggggagagcaaatagaatagaaaaaaaagaagacagctttagggaaaaaaataacatcagtggataaggttagaggaatagctttaagaataatttctccttaagacagaaagaatatgagaaatatgatgtttataaaatatttatgacagaagtaattttcttttaatattaacaataaaaattataaactgagacagatatcaccatatcaaaactgtaacaactcatttaatatacatgagagcaaattgttttcatcaagtctcacattaaggtgtaaaatatttttctaaaaatatattttactctttgggtggccaagattggtggcacttgatgtcaggagttcaaaaccagcctggccaacaaggtgaaaccctgtctctattaaaaacacaaaaattagctgggcatggtggtgcacacctgtaatcctagctacttgggaggctgaggtgggagaatcactggaacccaggaggtagaagttgcagtgagccgagatgatgccactacactctagcctgggcgacagagtgagtgagactccatctcaaatatatatatatatttatgtgtgtgtgtgtgtgtgtgtacgaaataataaaatatatattttagaaaaagttgcaaacagtggaacatttttactttctttaataactgattgccaaaaaagaagggatagaaagggaagtaggaaaaagatcaagggaggaagggagggaggaaggaagcggggaagcaggaagaaagggagggaggaaaggtggaaggagagtggaagagaaccacataactcaataaaaggcaatatgtgtactgtctatgtttttgtcttactaaatctcatactgttgatgacaaaccatctttagccatatacacaatctcctagcgggctccagctcaatgacttcaaagtcagcatactcctaaaccagctcctcacccctcctgctccctccttgcccttctctattgtctattgcaagcatcattttccagatctagtaacccaaatacgtaggtgcacttcctgacacccatcttcgcttcaaacaatactttctataggttcaaagtgatgatggcctcatcaccccccagtgtcaaatgtcatgctgctaagttctctgtcgaaaagtaatttggtcatgccaatgtctgatttagaaaacttactataagcagagattaggtgtctcctttcacacacttgacttggagaaattggcaaaaactcttcctctccctcaattccatggcttgctcatgaccaaaaccttcccccaggcttttaaatatacctgtaggagcagagagataattactcttaaaatagccttgcttttcccttacaccgtggacattcactattcttgtttatgaacctacttcttgcttctctttatcttgttgggtcttccctgtgtttcatttctctgtttctgatctccttcctaaataagaactcccaattcttctcctatatttcagagtaattcagctaaacctctctcctgtctcttgtacaacaaagcccatgcaatgtgtgcaataaagcccatcaaggcacaaagtggctctccatttgatttgctcctctgtctatagaaagcagatgtagtcataaagaagagaacattcatgaacttaaaaataaatactataaaaataaacaatggcaatgattcctatcagataaaacccagactccttagtttgttctgtaaaaatatactttttggccgggcacagtggctcatgcctgtaatcctagcactttgagaggccaagacgggcggatcacctgaggtcgggagttcgagaccagcctgaccaacatggtaaaactctgtctctactaaaaatacaaaattagctgggcatggtggcacatgcctgtaatctcagctacttgggaggctgaggcaggagaatcgtttgaagctgggaggtgaagattgcggtaagccgagatcgtgacactgcactccagcctgggcaacaagagcgaaactctgtctaaaaaaaaaaaaaagactcctcaccacttttgccatgtgtggttacagcaaaaagatggttgtttcaccagacacggaatctgctggtgtcttgagcttggactctccagtctcctgaattgtgatcaatgaatttctgttgtttgtaagctgtccagtgtattgtattttgctatagcagtgtaaacaggcttacagaccaagatatgtgacataaccccagatttagtttctagaatctcagtctcttgaaaaaaaacattcaattttttattcaaatgttttattctttctgtggaagaattatatgctatcttggaggtcatcttcttcagagcttctcaacctctttatatcttgtaacacacctgaaggttgacacgtttgtgccacatacgttctctggctgttgcagctcatgataaaagatataacctaggggtctggcgatgcactttgtgccagaattggaatgccatactctgccctgagtcatgccagatggaactgacggttgctgctctggtctaatcccccaattttactgaaagagaactgagacaaaagaggttagctgacttggcttctgtcatccagctcattagaaagtagcaaaacttgatatagaactgaagtgttttgagatgtaagcttctagataaggcagtgagacctgtgatgggtgtcaagaaaacccttgcctccactgttttaggtgattgcacttagtcacttacacgttctgaattaaaacctctctacttctgtggtgctgtcttcacatgaaaactgtcttgggtgaatttagcctataaaaagtagaattcatgaaaacatatttttcccagacatgatgtgaaattaaggctttgatactttttttatttttactttgtaattagttgtttcagatttacatagacttaaggcaagacgctgtgaaccagaaacttcaaagaacataggagaatattagctatctttggtgttaaggcagctgtgtttgtggcagtgactttcagctgagaggatagatactaggctagtgccctgaaataaacacggaaaataggctgggcacagtggctcacacctgtaatcccagcactttgggaggctgaggcaggaggaccacttgaggcctagactttgagaccatcctggacaacatagagagaccctgtctctacacagggtctaatttaaaaattagccaggtttggtgttacgcacctgtggtcctaggtatttgggaggctgaggcgggaagatcgcttaatcctgggaggttgaggctacaatgagccatgattgcactattgtgctccagcctgggcaacagactgagatcctgtctctaaaataataataataataatatacaaacaaaaaacaaaaactaacaaactgcatagaaagtagttggggctccagctataaaggcaaacttgtggatcacaaataattatttaaaggagatctgtttgttcacaaaagaagtatagtaatgctataatagctcaggaacagttgagtgtctctgcactactccctgtagacagtggggatgttgtacaaaacaaaggtttataatcagactttttgcagatcaatcaacctagcactagggtatcttctcctagctagaagatgaaagcaggaacaagccataagcatggtgaaaatttactcatttatttcaacaaaacactgtaatattttaatgagacattgaaaataagacatacaaccttaaaaataaaggcagaaaaatatttttagttgatgctcatgggttgaatttttaggtcacaatagacgagctggtagaaagaattgcttgctttaaacggaatagtttaacaaaaaatggctaggcacagtggctcatgcctataattccagcactttgggaggccaaggtgggcaaatccattgagcccaggagtttaaccccatctctacaaaaaatatgaaaattagccagcatggtggcgtgtgcctatagccccagttactcgggaggctaagatgggaggattacttgagcctgggaagtaaagcctggagcgagccatgattgcgccactgcactccagcctgggtgaaagagcaagaccctgtctaaaaaaaaaatgaatgcttgggaggccgacgtgggtggatcatggggtcaggagtttgagaccagcctgagcaacatggtgaaatcctgtctctactaaaaatacaaaaatcagctgggcatggtggtgcgcacctgtaatcccagctactcaggaggctgaggcaggagaatcacttgaactcaggaggcggaggttgaagttagccgagattgcaccactgcactccagcctgggcaacagagcgagactccgtctcaaaaaaaaaaaaaaaaaaaaatggatgcacacctttgtatcagcaccaacttgcaaatatgattaaaacaaaacaaaacactgttagaaatcactggctcggttgagaaatagatttctgagttgtcataggcatgaaaccaatactgtgccagtgaatagatctacccccaaacaaccttggtgaactgagcaagatcaaggccagactgtagtctcttgaagcattgatgataagcacactacggttaaagggcacgattaccctcggaatcataatgcaggtacatacactgaatgtaagaataatgtgattgaaactaatttaggactgtgccaagcaggaagagaaagtcctttgggcattcaaaaagaacatttagacaaagcaaaacaagaaggagaatttgtggtttgcaggaagctgttgctcatttatattttatcaaagatttaaaatgttgggcaaaagagtgtggctgtagcaagcagaaagaaatttggaatgtatgtggtttataactgaaataatcaactagaagaaacaataagcatcaggaggatttttttttaaagtgttctctttcgtttcctaaaattatgtattttggaaactcagatgggttagaaatatcaacagagatttctcgggtatctcattatgatgtctcacatgacttacactcttctatgttaatcaagtgaatctcttccaattatacagattgctatgaaaaatcatgagacatcacattttactaagtgggaaatactattgatctaacaagatccgttgaataatgaaaggggtccatttttatatgttactccctctagcaaggttgaataaatatgccagtgaaacatggaagaatggatttttatagtttcagatacttacatagttttagatatatacatagttttagacaatttgttagtaggctcagaaataatgttttaattgcctatatccccatagtacagtgctagacaatgtttaggatatgtttaacaaattattaattctttttaggagcttaaaataaggggctaatgacaatgatacagacaaatgcatgaaaatgttgtaaaccacaaataaaataatgttcaaatataagtacttttggtccattacaaatgtggaagatatatacttataatgagaggatagaaagaaaataccttaactcttattatgaagtaagttctcgatgctaacataatatattgaaaaattcttaaatatatatgacaagtgaatctatctatctatctgtctatctatctatctatctatctatctatcatctatctatctatccatccatccaatgggagaagatgtaaagtgaaatagccataggaagaggggagtaagcataaatggaattgttgtacatcagcagacatgactgtgattcattcagagggtattcaagaagaagggagaaaatggttatagtatggcattaaaaatattataatggaatactttgcaattgagtgagagaatctaacatatgaattatagggcaaattaaaaaaattatatggcctcaaaaaaatctggcatacacaaaatgacaggtgaaaaagataactttggcagaagaactgaacacttacaggaaataaatgctgtaacttgggattctagggagattcatatccaaacagggaatgaggattacacataaaccatcataagacaaaattcacagtttaacaagtcaaattgtaatgttacattgaaataatacattgcaataatacattgccttacttccaattatatcctccaagttagtatgatttggtcatgaaaatgacaaaaaataaacagacaatgaaacaacaaattcacttgttggaccaccttaatgatcaaattaagcaataatacacaaattcttttgtacagctatcactcaacaaatattaattggctactctttgctatacatcagaacaaatagttaccatacaaaataccagttgaacacagagtactttaaaaaattattctgcacaaatattgcaaaaatccatcgaagtgttgaaaggaaggcaagtcagattcaaaaaatgtcatgagtgaaaaaaacagatttaattgggaactgtaaatagaaattgaaaaacaaccaagcgtcatgaggagttttatttgggagcttcattatttatgtgttctttgccgacatgtagaatttggaggtggtaaaagttaaagacagaggaaaaatttctgtgtaataggagttggtcatgcaacttgtctcacagccagatgcaagtgcaggtctgaggtgaatagagaaattgacctatgggatatgtgcattcattcaactttttttttgagtccatgctattttgcaaacactctctaggcaatggggttctaacatgagtgaagcatggcctctgcagtcagtgaggcagccatgcagtaaacagctaagtggcaaggcaatgggggtagccccatggaaagcggaagcccaatggaatgaggggtggaagggcctcgaaagcacatgagatgagaggcagagactaaatgaggaaagaggctcagaagccaagaagagagagttgtataattggttatcagccgtgtcaaattctgtacataggtcaaggagcatcaagatggagaagtgccattgcgttttggcagtgagtatgttactggagaccttggcaaggctggcttctgggaagtggcgtgggttagagcaggactggatcaggttcaggagcgttttcactgaggaactgaatgcatctggtgcactctaggagttgggagaggaatggtggggaaacagttgttagagggtgtagggatttcttgagacccagggatatctgagactcagcaggatccaaatacagactttttagctctattttgtgaaaaacagagcttttcccagcagcaaggaaacagcatttacatcttgaagcaggctttgttgagcttgtttgttctatctggcaatgagtcactgtaacactgaccctgccattgaagtcagcagattctatttggagagctttgtgattgtggggggaagttgtttaaaaagttaacaaaaacatctactctccctgatctgctaaacacctgtgtgcattagttttgatgactattagctcaagagcatgggaatgctatttttgagtaaaaaaagggaagcctcatcagaagaagttaaatgtacatgacacaggaaaaagttataatattttctattttggtttctactcatttgaaaagagttttaaagagaaaagtgtaatagttctgccgaccgccaacctcaattaaaatgctaagtacaagttgcagtttccctacctctgccagagggaatatgtccaaagtgaccagccacctgtttccttttgtaagagctcaagactgcggccccgtccagcatactcctcactgacactaaatatcagtgtgatgatgaatcaaaagtcaacagcagcagagctttatttaccaagaaatgacacttagtaaggtcatctcttttggagaggacattgcaatcatttaagttgataaagatattggtgatttatcaacctcaaataaggcatgaggaacatgcctgttaaggggtacccaacttggctgtttccaacttgcttaaatatatatgcccacaggctggctgatgtttgagatgtttgagggatagtaatagcacatggtctgtgatggcttagctaggcacagtgaaggtcatagaactagaaacttaagaatcaattatgaaacaggttaaagttgcagtctataagagagtggctttggaggcagtaagacttgggttttaatgatagctgtgccatttactagctgtgggacatcagtcaaataacttaaatttcaaaggctctgttttctcatctataatataaaatagaaataatagtagtgcctcagggctgttttaaggattaaatgatagcacgtggagcataacccaggaccaggcatacagtaaacgcttcataaaatgatagctattatatatcttaaatcaagcatcctcaattccttgttgataagaaaaataacaaaccactagcatttggttaaaaccatgagagctaatgtgaaaatggatgtattaaacagcttgccataaaaatgctacattttttcaaacaattgagatatgtctaaaagaaaagaagtgagcaccataaaattgaacctaatctaaagggattgaagcaacagcattttaaacagcaaatagaacccacaaagaaaatccaaaagttataaaagttttattcacttttacaatttaataagattctgattttactaacattaaaaaataaaatcatctctattaaatgtaaaattagctttattatacatataaagagtctcactgctgttgttcaaattaatagtaaaaaattattccaaataagttctatgggacatattagcaatagtcagataataatcagtgcccttctctccacatataaaatgccctacttcatttttagaataacttgatggctgaagctcttcaccacattatctcttttatagttcctagttcaccatttagtatggaggccctagagccctctcttccatcagttccaggctttctgccagttctcagattccatgtttaatcagaatcccgggctctccaaccccagtccgtattatccatttttccaattcttaggggaaatttgccactttgaaacatgttatctgcaaatagaacccagaaacaaagaccttaaagttataaagaaaacattggtaatgtttcaaggaatgaatgacaaataacgaaagccctttgaatctcagcaaacactgggcttcagttacacccttaaggagaacccataaattcatcctgctgtcccccaaatggacttgctgaggaaaaaatggacttttttttttttttaaccacatataagctctatttttctagataagaaagaaaactgcaaaggcaaggtagcgtggtgaacttcccactcactggcgcagcttgatggaaattcaatttgacaaagcctttcttagccaaaccaccccaaagtggcctctccctccactcgtttgttacttaccattgttttgccatttgtgttcatgcatcctcagatgcatgaacggagggtaagctgggtaaacagaggtaagacggtaacagagggtaagcctccactagagctacatcttatgaagactttctctccctttctcccttacctcagagtctaagccagatctcactcttcctaaaagtccagaagttcaggagacagggaagaaggagggggaagggaatttggggttcttcttcttgcctttgtcaacctcctgtaagtcactcagcctcacttgcagttattcttttgtataatggagataattatagataccggtttgagaagtactttgatatcctcagataaaagaggctctaaaagggcagaggataattattattagcagctcaatggttcataggtttttccatatgcagctttctccagggaagctaaatccgtcaaaataaaaccagtttgagagaaaaggtacaatagaaactatttaaacaaggaaaatgacttcaaaaagatgagccagatgaaacataaaagtgaaataaaaaattaaagtgatgacatgcttctaaaaaaatctctgcagtcttgtcatgaatgaacctaacatcacacaaaagtggtgctggtaataacggcatcttgcatttgtataatgtctttcccaataactttacaactcttttgtgacataaagtgatacttagtaaatcttcaaattgctatcacgctcgtttttaggtgagatcattgaaggctgagccaccccactcttctgcaatgaacagtgagaattggaatccagttttcccagttcttcaacacagaagaaagacattggagtatcttccacctcatggaaactatagagaatttccttgttggaatctggtcagctaaagcatgcagctggggttttcagcatttgttctgatttttgtcttactaagtaagatacttgtctttagcaagtattgaaaaaacaattatgtatgaagggcctcccaggcagctaatccttgctaagagaataaaagatagggaatagaaacacaagtattatatcagtctccaaccacaagaagattatggtgtagttgagaagataagacatacacacaaaataattagtggtcaaaatattattttatgctttagtattaaatgctatcttctctgaagagctttccataattatgctaatgaaaagtaatctttcttttttttttttaattcctgtagtactactagaactatgtttcttatagaatttataagaggcatatatcatgtcacatcttctctttggtatcagagtttgagctcatcaaaagtagaaatcatgttttattttatcttggatttcattcggtgctttacattgttttggacataaaggaagggctcagcaatatttgttgaaatgacatagtgatataataatttcaaaatacaggcaattaacatataaggacaatatgtgcaataacattattgagcatgttttcactgataattcaaacccattaggctctaaacaattaggaaataatcactccaatcctgatattcttttagtgccctggtagcgtttacaaattagattatagttgaaaagttctttacaattattttttgctattcttcaaaaccatttgagtggctgggcacagtggctcacgcctgtaatcccagcactttgggaggcagaggtgggcggatcacccgaggtctggagttcgagaccagcctgggcaacatggtgaactccatctctactaaacatgtgaatattaacagggcgtggtatctcatggctgtagtcccagctactcgggaggctgaggcaggagaattgcttgaacctaggaggcggaagttgtagcgagctgagatcgtaccactgcactctcgcctgggtgatagagagagactctgtctcaaacaataataacaaccaccacccacaattttgttttccttcctcaagaaacataaaaaataaagtaagaaacttgcatgaccatcctaccctcaggaatttcttgtcatctttgcagcccctaacttcttactttaggttttctttggggctccaggtaaagaaaacagttaatctagaagtgctgagacctggataatggagccagctgccacagaggtaaggggagagagaggagacgctaggagaggggatttaggaattccagaatgtacttgggaaggacagccttgtatcccacttaatttcttctgcagacacaaatggaaaggctggctgtctatgtgcccctgaaataaggccagggtcaaaagtggggctgtggcctggagcagaattgcaggacggcttttcctccccaccaaaagaaagaaaaggaaataattgggtgatagcttactgctccctttcatcatttctttcctctaatagtctgtccttcatggaaaaatagcacatactttccattcatggaaatatcacatgtttatataaaatgattcaaaattaaatttaattttctttttactcattgggtacaaaataatttatattcacatactgaatactgacctagttagagaggtatccatacacagttaggtatataattctcttcttttaagatgctctccatctcagaaagattatttaacagggacacccgggcctttcccagagaactacaccagtaattaaactgatttttaaaaggatcaggatgttttcttcacattatgcatcagcttaggagcaactttgccacctcacttatctcaccaacctctttcacttttgagaaagggagaaaaaaagaaaaaaagaagtaaagagttttcgtcctaacaggatatgaagatacttttcttgagaggttccagatgtattttggctatccaatgccatgccctttgcaggcaacactccacgttgttttttgataacttcctaagagaagtcaccatgcccaggctaccaggggtcagacaaggtcagctcctgttcccactgtagggagggagacacaggagttggctttgcccaaaaatagcctgtgtccatgctgcggaattagcttagtatcaccaagtccaaaacttggagccagaagtcctgctttcagaaaggacttccagcccttgaacattgctgctactcaagtttttaattagttgtgaggtcactggtagccagcacactgggacagtaccatgatgaacagggtgggtgcctcaggaggaagccaaaaggatgaagacactacctttatgagaatattttctttctaccagtcctgaagggagtctaagtaacaagatcttggatttctactggtaaagggtcatttgccctaaatccctatagtttaccataatttgttctgtcatttccaccttccttattttacaaaaagctgatcatttcaacaacttaatccaagtcatgacaaatttgattgatagacaaaacctccattaggcagatggactttatactttgagccttttctggcactgagtacatggatcaaaattgagtagatgaaattttatctgtaggagaagagataaaattcagtctactatggacagaatgcttattattctcctgaatttgtattcagtaaatatcttatttttaaaaaatacatttgctaaactattagtgtgccataaataatgatttataaatgttgtctaataaatcacttccctggctcacagctaaatattcgtatctcttttgtttttacagatggacaaaatgaaagtcatagattaaattaatggaaggaaagtgaactacaaaccatgcttacttctactttggcaaagtgaattattcatgaaaacgctgttgcaagcatacagtgccaaaggtagccctcaggatgatttttctcagcctctgggctcagagagtaattgcaaagtgggtagcaattacttttggcatctttccacttcatgtccagtgttcttctcccacctacttttctggaaccaagtatgtggtaaccctatcaaaggcttatggctttccaaactcttctcagagtaatcctactcatctctctgcactgaatgacctggggttgttataattggtatataggtctatagttgttatattcagctgcataaatacatacacacacacacacacacatacacacaaacacacacaatggaaggaaagctttcttattataggcccaagatcatttatgctaaaatttctggatgttaagagaagtttgttcattaaaatgaactttaaatgggtgtgacatgtggaggagacagtttcacttccttgtccccttgtttgtgccctactgtccccatgtctaactcaccttccaaacaatactaagaagaattagttggcaatgggtattctacttctgaatgctttctttatccctattcatgagaatatagaccttaacaagactctgccgacctcagacattcttaaaacaatctcctaaaatatggtgtgaagaagtgctaagaatttaactccctgctccctgactcttggtaggcaataaagtataggaatttagaacaaagacctttgggtccaacttctggagtatgaattctggttctgctacttgccagctgtatgaccctagacaatttccttaacctctttgtaaaatggggatatggtttaatagattcacagttcctcatgtctggggaggtctcacaatcatggcagaaggtgaaagacatgtcacaaggtggcagacaagatagaatgagagccaagtgaaaggggttttcccttataaaaccctcagatcttgtgagacttcttcactaccacaagaatagtatgggggaaaccactcccatgattcaattatctcccactgggtccctcccacaacacatgggaattatgagagctataattcaagataagatttgggtggggacacagccaaaccatatcaggaccctcatgctattacctcatcacatggttttaaggattcattgacctaataagtatacagtgcaggacctggcataaattatttgttattactgcaggtgtagccattactgtgcactatatcaacatccaatggagaatccccatgtgggtagcttcagtgcttacccgtggtcacatctctctctgagtatcctggctttagtacgtcatctcatttttctgtctgtagttacttatgtggaaatattgtgcatcaggcactatgctaggagctagaaactgccgcaagctacacaaataagactcctatcctgaaaaagctttctgtgcagaagggataacagacagaactaattacaaaagaaatttcaatgatgataaatgatgataagttctgtagaaaaacaggtgttatggaagcatgcatggtttagggggaggaagactacaagaattaggaaaaaaattcaccttgaaagatgagtaggaatgagatagtgcggggttggggatgtggagtagaagacaagtagatgtaaaaatggtagaagaatccatgtgaatagatggaaggaagccagtgtggttgaagaacaagagagcagtggatgtgattggggcatattgggggagtggtgcagaattcggctggaggcagggcagggtccagttagatcaattattctcaaccagggcagacatttggcaatgcttggttgagatttttggttgtcacaactgggagtggagggttctactagcatctagtgggtcaagaccaggaatgctgctaagcatcctgcaatggagaggacagcccccacaacaaagaattatcacactaaaaatgccaatagagctgaggttgagaagccctgggatggatagatcatgcaggatcttgaagggctgattaaacgtgttttgctttactataagaacaagggcaatccaggggatggttgtaagaacagctgtgatgtgattacatttgcagctggtagatctttgcaaaagtcaggtgagagacgaggttggcttggaccaggcttgcattaaaatgtataccccaacaattcctaaactttgagctgagaagggaattaaatagatgtggagaggaagcagaaaaaataattgaactccagagaaagacagttgtgttttttcaggattctctggctcttgtaaatgcacctcctttctttcctggtatgcaggagtcaccgctgactctgtgttggttggtagttaccagacaggcctcaacacctcttccaccttctccacccacctttctacctccattctgcacttggtattgagaatcggcccttgtgggctcctccgctcagtgacactcacgttggaaacatgtgctaatcactgctcaatggatccgcagagcccttcccccacccagagtgaaatcttacgtctgtcaattgtgtcaaatgctttgaaaatggaacatctgtttcctccttcaaaactggatgtctaacaaattccacaaaacagcagtcccctgtgcctgacttctgccatgcacctggtaccaatatggccaggattttttgaagatgatccagatttatatatcatttgatggttttaaatgaaactaattcatcatcaattttataacttcatctaatagccatcttcaatcctttctggaaaaaaaaaaaaagacaaggtggaagtacatctaattgtgatttgaattttaaatttgtaaagttttcttccagtacataaatatataaatcagaagtactgattggggagtgagaaacagggtagctgcactggtgagtcatattcttcctccaggggaacaacagaacaaacagtgtggcatccatatatggagacttctagagttggatgtaccaagttgcccatatcaaccaggtataaatcagaccagagtctatcacattcagggccaaaaagaatggaaaaagtaaacgtgtaaagcagccagattaagagaatagaaagtgctggaatctactgggaaacagatatgtccacctaaaagtgttccagttaaaaacatttttttaaagcaatgagcagccaaacaaaacaggtctacaagcgtcagttggccaatagctgccagtttgcaagttctagttaaggaaaaaataaaatcaaaggcctaaagagctccactggaaaatttaaatgcagttaaagagaaaaattgctaaaatattaaaagatgaaactaatgaatgtatggttcagaccatagcagacaaattttaaaactctttcttctttttcccctttcgatgttgtattatttatagggatcatataagtacaaaataatttatcttgccctctttccctcaccatctctttaccatctctctctttatacctcatacacaacacatcaccacaacagcaggggtgtgagggtcaaatcaacgcaagcaagggaattcacaacccttgccgaactgctgtccttaattgtgtgcagcagcatctataagctctgcaaagcaggtcatcagaatctgaagggacatattatctgtaattcctggtgcataatagggcacattaaagacaaactttcagccttaattcttaatctcttttccagctttggtagatttaaaaatctgatattctgagcacagcattattcttcccagggctacagctgtgcattgctttctatcttgggaggagatgtttttgcacaggtctaaggaaatgcaacacaagggaaatgccattttaacaaatttcaagggaggggaaagattgctcttctttttgctgcaacagaattttgctggtggaaacgttgtaaaggtggaatcttcaatatgaggaaacttgtagtttaacatttataaagtgccatttattcctgaagaactcaaagacctttacatatgttaggcactgtcctgatcccatagttcacattttggggatgtccagaccacattctcttacattttctcagccttgctctgtgagttaggtaaagacagtgaaagagggtcaaaatggagggaacagacttttattgtttttgtttgttcatttgtttggtggtgatattgtttggatatttgtccccttccaatctcacgttgaaatttgatccccaatgttagaggtggggcctattggaaggtgttttgttcatgggggcatatttctcatgaatgtcttagttccctcccagcagtaatgcgtgagttctcactctattagtttatgtgagaactgattgttatcacatcaagagagaggggagaagctggcacttcctcccctctctcttgctctctctttttcaccatgtgacatgcaagttttccttgtcttttgccgtgagtaaaagctccctgagcccctcaccagaagccgatgctggtgccatgcttcttgtacaacctgcagaactgtgaactaaataaacctcttttcttgataaatcacccaatctcaggtaatcctttatagcaatacaaaactgactaatacaggtggcaacaaatgacttttgcaatgactaaaagatgatgtaagtgtatatagtgtatatatgttgcggcccctttctataagattcagatccactgaatgtttcttgggttccctaaatcctctattcaatacctgttggttaggccaggcactattctaactactgaaagtggagtagtggttatgaaagacaaggttcttgttctcatgaagctgacctgatagagaagaagacagtcaagaagcaaataaactggaaatatgacacgtacgctatgcagagaattagctgaaagtctagatggctctgtagattacatggtcagagaagatgacatctagagacaagaatgacaaagaggagctaaagattccagggaaagggcattctaggtactagaaacagctagtggaaaggccctaaggtgaaaaaagaccctgttcgctaactacggctgctgtaacaaattcctacaaacttgacggcttaaaacgacacaactttattatattggaatcgtgaagaccagcagtacaaaatcaagtttcactgggctaagattaaagcgttggcagggctaccttcctttcagatgctatagggcagagtctgtttccttgcttttccaggttctagaggccacctgcaacctgcattcctttggctcatggccccttcctgaatcttcaaagctacagtaaagcattttcagttctctctctgaacctgacactcccgtttctctctctaacctataagaacccttatgattacacatttgccccacccggataatccagaataatctccctgtttaataaccttaacttaattatacctgcaaagactcttttgccatggaagataacatattcacaggttctgaggatgagggagtgaacagctaaggagctattgttttgtctaccgtggtggaaatgaggttttctatttgagggacagaaagagccagtgtggtagcaatgtagtagtgaaatagagtatgttgggataagttctgactttccagtggcagtagtaaatgctatcgccatcatcacgccattcactgttcagttggacttccccaaacttctgatactggcacaggatgggtgaggacattcaacctttggggtttctgagctcctttgattaatagtaaatcggtgttgccattccttagtctaattttctagttttaagtacagcaaagttttagcatttattataaacacttttatattctgattcaccaaatcatagaaattcaaacctcaagaaaatgtacaaaattacctatttgggcttttagtttttacaaaaaacaaaacaaacaaacagacaaaaacaaaaaacaacaacaaaaaaacggacattgagacaagagaagttacatgtctttcttaggaagatgaacttaaggccaaaacctcaccgtgcagtgtccccatccatttctcttgtgcattactacattttaggtgtgtgttatttttcctaattgcagctgcctcgtgtgggcatagggtgttacaatggtctggatgttccccaggccaagcgtgcgttgttttgcttgcacagaagagtatatggtaaataatacatgttgattgatgggctgattcagtccattgccctttcctgcccccctcccccagaacagatatggtaaaatagaaacttctgatttacaggatgtccgaaaggtatgcaatattttttatcaattgcaaaatactctaaaggctatcctgtcatttgataagtccatcatttgtggacgtacttgggactttgccaagaacaatcaggtgagggtactaaccataacttgctaccaaaacattatccatctggaatctatgagccattcagattaatttattttggggtttttcttacctctgtaatagatttttgatgtaaatatttttgtatttcagagaagtttcagactttctaatcctatcaatcatctccaccaccctctaaatttgcccaatagcagaggatatgtagataaaaacagcaaaagaaactcaaaacactgtgaaataaaggaaattgcctcgatgactaatagaaatttggttatatagattagaaagattgacactagcgggtaaattttacactttactttttggctctgggctctgtagataactaccagctacttccaacttgttcctaaaaataatctattgaaataacttctgaaaaatacaggaagtggcgagacaaattaatccttataaagaggaacaaaagagtttcctacagcctgtcctgggtgagaaagctggttggggcaggtcccagaggcagagctgggtgtgtctcttgggtgcagaacaagtctataaagttcaggcaggaaagtttgctaatctctaagcaggtgggtcaagactcatctacattctggactttccatgccactgccctgcgcttttcccaagattcccacagcagaaataaaaatatttctagatacttctttaaagggtgtaagatagcccacactttaaatcgttaatgtatatctcaccaaatgtaatttattatcttgcgtgtgctgtgtaaatcactatattggaccaaaagcaaaccacaagttgtttatatacgagaccagctcccagaacattcagttagttcatttcacttcagtgacaggagggaaacatgcatggggagcattttttatgataatcatagggctttttgcattggtcaaaggaatggaaaagtgtgtttccagtgttttttaattctaggcttagaaagtttttataagatataaattcatatttttggcatttaaaaaacagtttattagagttgccatattacaatgttctattttctgtggtaactgcactacacacaattttagcttctttaaaattaagagcttgtagcaagttgaatgtggcttaactttagaaaataaggtcccagagtccaggaagttcaataagcgcaaatgctctggacaggttaaaatcctacagcgatttactgttcattacacatgatcgtagccaaaaggctgagaaatgattattttagtgctcatttattgtagcctgagagctgtgttttagcagagacctatgcattcaaataacttaagatcaggtttgtggtacacgaactagtatacgatcaagtatgaaatcatatgaagaaaataaatctgtagttttgaactaggagtgcaaagatagttttaaagagaacttagatattaaactgttggttgatgagtgacattgaggagagggtggatgtggaggaaatattcaatgctgatcataatgacataataatagttcactgcatgccttctgcgtgccagctacgaggctatgtccttcatgggtattatatctaagacacatttattctgcattcccattttaaagatgaagcaactgaggcttaaaatgtcacagttaactaatgacaaagctgaaattcaaacacagaccacagccagctccaaagactacatttttccaccataaaatagcaataagcacaggaataaaaattttctgatgagctggcttcagaagaagataccttaggcatactaatggacagtcaatttggatgggtcatagggagctaaattgtggaggcatttgaatgccaggacaaaaagcttagatagcctccatgaagaagtaaggaaccacaagaggttgttggctaaatctataattctggtcgacatcatatgctctgtgcagatttctgactcagctttctgtctccagggcaaaagagaaatataaactcctttagtctagcacagggcctggtatttacaatgtgcttattaaatgccacatttcctttcattctggggactgaattcctccttttgtgcctccctttagaggcctttgcagagcaagttggtcaatggtccatcttttctcttcaccagacacaacagcctaaaactcggatttttttttttctctgcattcttactgggagcaacagaggaagcctgagccaagggacttttactactgcaacctggacccatgaatctcaggtaaatcaatgtctaccagcatggagtggaagagttcaacctacatttggaagtaggataaaactattccaagaattacatcagcaagtaaatgttttgagggcttgaggtgaggaaaggaggcactgaagggaccagagctatgacctacctttacagaacttagaaatggaagaaacatctgggaaagagaatagacagctcaagaatgaggatggggaaaacaacataaatagataaggtgtgaatagttaaagagatgactacacatacatcagttctggaccttttagatcaaatagttctggagtgctattttaggagtaggataagaaatataaaaggtgataactggccaggtgccatggctcatgcctgtaatcccaacactttgggagggcaaggcagaggatgtcttgagtccaggagttagagaacagcataggcaacatagtgagacctcatctctacggaaaataaaagaaattagccaggtatggtcacacacacctatagtcccagctactcagaaggctgaggtgagaggattgtttgagccagggaagtgtgagggtgcagtgagccatgattgtgccacagcactccagcctgtgcaacagagcgagaccctgtctcaaaaaaaaaaaaaaaaaaccccaaatgtgataaccagtaactagacattcatgcaagcatcagtactgtgaaccagcaactagatgacattaaaagagtcatgttactcttttcatccagagcaattcgtcttagataatcaaaggcagttaaccttaatttgtgccaaagataaatgcaaaattatcaccaagaagaagttgtgggtggaaattagaaggttttgcagttgattgattatatcgagcaataattcgttgatctgacactgaactctatctaaatattttaatattaggccatatttaccactattctccattcctgttttttttaaatagtaatactataaataagaaatcaaaagtgattagaggaaaggacttttgaccagaaattgcaggagagattggtgtgatggtccagagaaagctaatcaacagcaactttcttaaagagtctttctgcccctctttatcacctccctactttcagtgtggcaatgcctctgtccttgctattttccttttcttcacttcttttcttcaatttttcactctgggaattaatgactatttcttccaaagcataaaagataaaaatattggtcccgggaagtctaagggaaagtctctgtcactcaggttgttggtacatatctttctgcagacatttgtgtttgctgatcctgtcctgtgctccttctattctacagcaagattactgtctggtttccccatctcttctctcctgttcctctgtgtgtgtgtgtgtgtgtgtgtgtgtgtgtatacagggagaagagaccaaaaaaatatggaaaattagaaggaattgttgttaggatgtccatgaaacactgaactcatatttatacattttcactcattggtcaggaattaagaatcaaatggggtaatcatgtttgtttcatcgaattcatcttattcgaaaaaagaaattcaacaaaccctgcatttctcatctgtaagcttagattattatagtagatatgacatagttttattcttgtatcttatagcaattagctatgtaagctacagtcacctttgcttgcactttgttaaacctacctggagcaggtggcaagattctgggatcgagaggcaggtggaggagttggaagggtcaattcccgtgttctgcctggggtaactgagactgaatttggaggccatgtctgcagccctggctgtcctgagtgtgctgccaaagcatccgactgcattgctttcagggcaaaggtaattatgtgttctggagaagccctactacttttcagattgagcaaatcctgaacaggtgcagccctaatccaaggctttgggaggagctgctggagacccagctgcgggtgctggcacgcttccagaggaaagcaggaagcaagaagactgttgcgggaagagccaaaagtgcaacgtttcagtaccaaaaagatcgttggcacagaaacaatgaaatgcatggcctggccttttttgtctccctgccatcttgctgtaaaatgaggtggtccctggaaagcccagcacaggaaagctagatatatagagtctgtggatcatccagtgatgacgctgaacataaaagctggagatgtgatgtttccaaataatttatatttgttttaaatttccctccttttcttataaataacccaaatccagatactaggataaatgactggatcacatccccttgtcacggcaggcttgcaaaaatatattaggaacgagggagggcaatgtgcacagagaagacagacctgctcctgtaccttgtcatttgtactccagtgatgaatttctaaactacgtatttgagcatgttaatgaaaaagaaaagagcaaaggaaagaaaagagaaggggagagagaaaatgacaaaagaacagaggaaaaaaaaacactaggcaaaaaccagaggaaaatgaggcaggaatattaggttggctaacaaagtacgttttggtcaaccggctttggcataaacggacttggtgcctgggaaataaagcagataggtgagtggggggctgaaccactctggaagatctagatgtggttggggaatgaggaattgtcagagagaattaggggtatttattgcatggtaccctagactgggctccaggactgaccccttgctgaatgagaagctagacacacaggcgttttttaagattaaaagaaaaatgagaagagggtgacttggtgtctgaactaagctcaactactaaaatagacaaaatagcccagtggcgaaaggttaatttgttggcccccagaccctgaagcaaagcttcagagggggcccctttgatctttgctggttactaaatgaatagcctgtagtcaccacctcctgggtcccagaaaccaaagactacttattgatcagtattgaacaaaatttggcaattgaaatagtagcaatatattatctggttttggggagggggatggaagtctgagtattttcactaggactagtatggattttgcaggtggtccctaatgcttagctcactaacaatctcactctcccttttctagagctcagaccctctctttaaatagctaacccttcaggcttactgagtatcagttactgatttgttgaagttaactacagtgtgtttatttgggaaggaggttacttgaacgtgcccttaaattgctttgacttccaactgcaacaaaacacgtcttggcttctttggctgaggggatgatgtgtgtgacagggggcaccatcagttaactccagtgccactgtgaggctgaacgtgcagaaaaaaaataaggagagaaggaaaaaaatggtaaaggaaaagcagtaagtgaaaaggaagataaaaaatagaagagttgacatggtggggagaggtgaagtgacaccagtcgctgcctggtgtgacatttaatggcatcaggatcacggttaccttctctgagggtaaaccagagagcactgtgccacctctggagtcacaattacaaagtgacatctctgcaagggccaattttgaacaggagaaagccctcccccagggacgatgagcccatggtagcggcagatagtgcaaacaagcacaaatgcccatccccatggcaggcataagggggagagggatcatattttaaagctccattaacaaagaactttactcaaggaggaactgttaataagtaatgaaacaaagtgcctgttatggagattaaatgctcctgtgtcgaggtacaaagttcaggctgcaaagtgcagctgtcaccctgtctataaccccacggcagccttagaacccctggttcaaagtgtgtcttgctgccttcctgttactaggctgcctagtgcaaggtccagccagggttcacagttcagcgtctgaggctctgctgactgccttctttgtttaacttgggcaagcttttgataagccagggactgcttatttaaggcgattattacaaacaactgacagattattttcccagattcttgcacttattcttcatatgcaagtttaaacgagtcccaaactataatttcttgaggatttgtgtgtgtacaaaagtaatcgagataaggatgtgtgaaagactaggtaaaaaaatctatttctaaggaataactatgctccaagcagacatagaaaaccaaggtcctttgaagtaaggactcgtgagggcaatttcaagacaggtcaaagaattctcgtctctaatgatcaaagatcaaataaataccagatttaccctttaaaatcaagcgaaccctttccttgtttaacagtagatcagtgttaattcatttctgaatagagtctccctctgtaattgttctttttatttgtctactaaaaattcagagggaaactcacttttttcaaatagtttgctttgctcgacctaatcctagcaaaagccacaggaaggtggaaaaccgataattagtattcccattatgcagatgaggaaacagactcaaagagagtggcaatttgcccagggtcttcgagttagttaatcttacaaaaccaagaccacaatccatctcttcagcctttcctctcagcacttgtttcagaagcccactgcttcctcttaagtcctgacaccaattctatttgaatggcagtagttctttttcatttctcacttttatggaagtgaacggagtctaagtaaaacactagaggcaggcagtttgggaaatgtgatatgaaaaagcactccaggtaaggtttagggaaacagggcttgactttgtgatggcctcgtgccaggcacctgttattcatgctgcttctcctggccacaagtgccaagggggcaggattttcagctagttgcccagtgggtcgttcagggtgctgctccttctggagatagcatagattaatattttacctcagaaaggagtatagctcattggtgatacatgagtgccctacgggcttagaatttagaataatacttgcttatgacgcataaaagcaaactaagatttccttgtctcatattttctctacattggcatagagttgaaaaatcatcagcagttttttttttttttgttgctgttgttgtttcgtttttgagacagggtcacgctatgttgcccaggctggaatgtactggtgtgatgatggttcactgcaaccaacctcaacctcccaggttcaagctgggctcaatcgagcctcccacctcagccttctgagtagctgggactataggcgcacaccactgtgactggctaatttttaatatttttttgtagagtacggggtctcactatgttgcccagcctggccttgaactcctggactcaggtgatcctcccgccttggccccctaaagtgctgtgattataggcatgagccaccacacctggctgcaggtttgactccattggcagatacatattaaggcctacaatgtcccagatatttactattaatttgtagatgtttacatacgtaaatattttcatagttattgagcccacactgtatgccatgaagaaggcatagatagaaattcagatacatcctacttctgtcctcaaagagcttgaactgtagtaggaaggaaaatgcaaaaatgtacatagcaggtgacaacaaagagatacaagcaaaacactaagagatagaaaaaagcagtgagagtaggaagtgagtctttatttactgagcacctacttagggccagtctcaagaatgaatgtttgacctattttaggcttttaatccacacaaccacagcagggagtaaatattatctccattttacagataactatattgaaactcagaggggttaagacacttgtccaaagccatagaacctataatgaacaaaagtgggtttgaacctatttctccaactgagcttcatgtagacaagcagatgttggaaaaagagtcagaaaagaagagaaaacaaattattagaaaggaaggaagacaatagagattttattgtatcctgaatggcaagatagaagggattctctgggtgatggtaggtgtgatagaagcatgggggccagaaactaaaaagtgaggcctagacgggtggtgaagtagaggaagcatggtggaagctctgaatgtgaactcctaattcttttaatacatggcaatagggagaaggggtcgaacaagatgcattattaaggtcatcttttatgggctccctgttctttggacccatctacaaaaaagactgtacttttctcatgctatgtatatgttcttatattcttggaggatggcagctatcaccttacttaagacacaccctaacctagatctcttgctacaatctctctcttcagatattgatttgtgtttccaggtgcccatgcagtgtgtccaactggtcaattcagagacaccaatatctgctcctgcaaacctgttccttccctacatcccctacctcagaccatgtcatcctaccactttagtctcccatgttatcaaccctgacattatctttgatgcctttcttacccccactctgtaaattcaacacatctccagtcttcatagttttaaccctgaaatgtctccaaatacatcacctcctcttaatgcccctgctcatactatgtatttttataccatagtcttatgtcatcgcatatgtgtaagagacatactttcatatgagactttgggtcaagtcttcattatctcttgtagtgataaaagcatggttgatctaatctctgtccttcacagttatactccgctctgtctttccattactactgttactagaaatgatttgtaaagtgtaaagcaagtggagtcaaatctggcaatgcctctctcttgctttgaaaacattaataaaggcagaggccaggttcagtggctcactcctataatcccaacattttgggagacggaggcaagaggactgtctagtctctacaaaaaatttaaaaattagccaggtgtggtggtgcacacctgtagtcccagctattcaggaggctgaggcaggaggacctcttgagcccagtagttcaaggctgtagtgcactatgattgcacttgtgaatagccacgatgctccatcctgcacaacttagcgagactccatctctaaaaagcaaaaaaacaagctctagtaattcctatatctttacaaaaaaagttagcaaactagtgaccatagaccaacattggcccacagatttattttatttggctgacacaagtatggaatcgttgtgttttaaatttgtgttagttgtcaatatttaaaagttgaatatttcacataaacattgagatttctggctctgttgagaaatcaagatcagtcagcactgggcaggactcccgcagagcagccaccagaattccatagcagctgcctgttacagaggggcattccctctccggtttaacccagtccttacaatcatgtcatgctataatgggatgtgagtggcactttacctccataatgtttctccccaaagccataaaaccctcgtctaatcatgagaacaacattagaaaaactccaagtaaggggcattgtacaaaattcttaccagcatccctcaaaattgtcaatgtcctcaaaaacaaaaaaagtctaagaaactgccacagccaggaggaaacttagtcaataaatgtaatgtggtatcctggatgagatcatggaacagaaaaaggactctgggtaaaagctaagaaactccaagtaaagtatggactttatttaataataatgcatcattaagtgtttatttattcatttattttgagtgagagtctcactctgtcacccaggctggaatgtagtggcacaatctcagctcactgaaacctccacttcccaggctgagcaattctccggtctcagcctcccgagtagctggaattacaggcacgtaccaccgcgcctggctaatttttgtatttttagcagagatggagtttcaccatgttggccaggctggtctcaaactcctgacctcaagtgatctgcctgccttggtctcccaaaatgctgggattgcagatgtgaactacctaccatgcctagcctatttgtttattcattgtaacaaatatactatgctactataagacgttaggggaaactggatatatagaaattctctgtactatattcacaacttttctgtacgtctaaatcattaaaatgttatttttcaaaataaactaatggcaaaagtaaaatgtaggcaagctatttgttgacctctttccattgttctaatgcctttgtttctctagtctgtgtgttttagtgactcagtgatactacataaagtattatcttgcacatatatgcacacacacatatcatttcatatatcaattatctttctttcatgtgtataagtacatacatacatatatgaaagatgacactttatgtgttttcactgagtcatcgtctgtataggtatatatttggagattactaaagagccaaacgcttctgatacctaaatgaataaatttctactggtaaaaatttaagtcgttgtcgtatctgaatgtggaagataactatggttggagtagaaacttcctaatcataacagcagccctgacttttattaaaacattgaaaaagggaaaagacacatggaaacagctggttttgtaggatgttgaagatccaaagcaagagatactgcaattaatctgtgaggaaggaaaaatatttctatgattctcacaaatgctcacaaatcactttcactttattaattttattttgtaaatcattccctatggtcacctcaaggggtgcattgttcttctctcatttttttcaaggtgaagaaattttggctgaaagagactcactgactttccagaggttatctagggattcattaacagaataaaaattaggctccagctaatgtcactaagccattgctatcctctgcatcttcttgcttccctcaatccaaagaggttctaaataaggagataacataattacataactttagggaaaatgcaaatgaaccaaatctggagaaaagatgaagataaattaatcagaacgaatgagatagcttaggattgcatggtgttcaggagacagcaaattaaattgccatttgtaaggaataagatagggcaataagaaaggccagagatattctgttctgtactcaaagagggatagcataacccgaagacaaagtaagggcacggtgctagtattaggatggtgccattactttttttttctttttgagacggagtctcgctctgtcgcccaggctggagcgcagtggctcgatctccgctcactaacctccgccttccgggttcacgccgttctcctgcctcagcctcccgagtagctgggactactggcgcccgccaccacgcctggctaatttttgtatttttagtagagacggggtttcaccgtgttagccaggatggtctcgatctcctgacctcatgatctgcccacctcggcctcccaaagtgctgggattacaggcatgagcgactgtgcccggccggtgccattacttttaatggcaaaaacagcaactgcttttgcagcaacctaatagtaaacgtgctgaggccgcatctattctgggggactcattttggggtccatgaacacaaaacgtgcagactttttggaagaacgccaagaaataacatatgcagataatatgtgaaggactcgggctgctttcctcactgtccgtcaagttctgaagacaaaattatgccagatggaattggtttagccagctgaataactcaggtgggaggtctgtgtagacatgttttgttcagtttttgttgccttcaatttttgatatggaaggttctgtttggatggggataaccatacatgtgtgtgaaataagtgacttactgtctacaaggtatagccccaaaatttctatcttggacccacagtgatatcattttctctgtggcctgatagtcccagcatgagagaaggaacgacttgggaattaaaaaaaaaaaaaaacaaaaatcactgcagaaagtgtgatttccgaaaaggcataggtaaaactctctttacattattggagcaagaccttctggtgctcttcctcagagcatcttcacaaggttgtttatgaacggatcccactgacatcctgggattcacagaagagtgcttggtgtaaagagatgccatttgcattatgctcgggtgatctttaatcaatgtttttttctatctgacagaaggggcaatatccatctacctctaaaggcaggcagagctgagtgatgtcatcatgaactgatggcagtaggtaggagaaatctctcccaggcacaggtgatacctaagaaagtgagtaaattctacttttgtagacaatggctgctgagtggagacaagggaagtttgtattgagcagggtaggagaactgagaagaatctaactttacctactttactctgccttcaccctgatgaccagggaggtgagagccatgttttgcccttcttatctccccttccaccttttagtatcaacatgatctcccctcaaagccaatgccctctgaggggaatgactcagcccctactctgctataacaatatgaacatttgtcaatacaattaatattctaaatggatggatccatgctttttctcttcccctagcactgttggaataacagtatctggaaaaagtaatgtaaacactcaaaagaatgatttcaaaaaagaaatacagaaattgccacaatctaagacactttcatttcaaccagaaaggagaccaaggacattaaaaaaaaatttgaggctgaattgaatgattaagtcttggcaaatgtcttttgacaccaagaaggatgtggggaaagggagttttaaagaaaacttgcagttagagagtctagagtgagaattagaggttctgggatgaaaaagggcatgaaggatttgtcaaagccaaaggataaatgagctgatttgggaagggagaggaaactctctatttctttctttgttctttgctttgggcctggaaagaggcagaaacccattctcaaagaatgtgaatgtagttctttcatgtttctatcacattttttgtcctttttttggatgaaccatttgaatgcttacaaaaatctacttctgcattgcataactcaagacttgaaaccaaagatgtctggaagccaagaactcattttcttatttaggacatgaaagccccaggtacacaagatcttacatttatgatatggagaaaaatctataatgcttatgtttattatttgatttctaccatttcctaatttttcaattttaattgacattggtatgacttgacatggcaagaacaagggactaagtataccaaactagcacttcgtttagtattggtatgtataaccacagcggctgtaatagcacattgcctcagatttagttgagagctgaagaaattctctgcagcctcagaacaagaatttattaaatcttttttagaggggtattaccagacacaaatgtcaagtcaaggaacaaagggactaatccaaattcacaaagaatttgactggctgtgtctcctgaacccgtgacttcctccagcacttcagatgtggcataaagcaggagggatttcctaacgatgcagatgcactagaagccagagggtcagggagacctcttctctcactggtgcttggaagatttccataagtaactcccagtgctactcatgagaactacataaattaagccttcagttcaggatagaacccagacttgtagctgagggcatactcaggacaaagtggcctctgagtatgcttagaactcagaattcaagggcagtcagaagaaggctagacacatcttcaaaatgtgttggaatccatttgtgatagctgtcaatagctttatgtaactaatttacacagctcatgattaactagtagctaaaatgttacagaaatgccctcataaatatatttccaaaatcaatttgggagcattgattatgtctcgtttattgaaagaatgtagtgagttgtaagggtcaaaggcaagatgacattagtgagaaagtgagtaagcattcaaaaaggagggcagatatctagaactggactgtccaatagagtagccacaagccacatgtaataatgtaaatgtaaatgtaaattaattaaaattaaatgacatgtaaagtccggtctttagtcacactagcacatgtcaagtgttcaatagccacatttgcagagtgcagagaagaacatgtccattgttcctttccttttgaaagttctaccacactatgcagatccagacccttctgcctctgtcccccaaccctacagcttatgtaatttccaaatccccatcagtgcaattttaagattcagaatgactctagaagaaaccaaaaaataaaagtcaaaaaactagaacaaggctgttgccactatcagctgactacgtagctaatgagctcatggccatgggggtaggaactactttggagcctaattttttccgtacatgtgagaagctctgaattgaccccaaggcgttctagctaaagtcatcttcctttaggttgtggtcatgtgtttatagggtctgtctacatttgatatctgctcctggctgttcctctaactacacagcctcccaacacaatcagatgatggtttaagagaaacagtctttgacggactaagcccatgccttgcccaagtccacccatatcactgtggtttcctcattcatgtgaatattataggttaaagtcagggttcagggtctagaagcaggacatgaagtataaaaagagacatcagaattactggaacactaacatatgaatgagtatgcgcaaatgctattacatggtgagcaaacataagataattcatttcatgaaataagcttagttgccaaaaccatgtttagtcggaatctttttttttttttgcagccatgtgatttttcaaattatcttctgtgtgagtatcaataattgtaaaaaccagtcaaacattccttcctttggactttaccctcctgtaactgaagtgcttgatctaacctttgacataaaatcaggctagtgtcacagagtggggctgcacctactgttctcaaaaacatctatggagaagagtggcagagtgctgttatttctaaaaaggagagactaaataaatggttttaaaataagcacaagttactactactttgcttatttttgttacaattgctcaataatagatgtgattgataatatgataatatagataaatcaggagcattctacttaaatgggtctcttccccaggaataattattttctagaaggttgtgcctgaaaaggttggtgtagttgggtgctgtatttctttctttcttttttggagatggagtctcgctctgtcaaccatgctggagttcagtggtgcgatcttggttcactgcagcctcccactcccgggttctagcaattctcctgcctcagcctcctgggtagctaggtttacaggcatatgccaccacgcctggctaatttctgtatttttagtacagacggggtttcaccatgttgaccaggttggtctcgaactcctgacctcaggtgatccactttggtctcccaaagtgttaggattacaggcgtgagccataggtgctgtatttcatcttaacttctgtttctgatgaccaggtaaagacgacataataaaagaactagggactacattgacaatagggcatgaagaaaattcttatactctagccttgctcattttgttgcaataaaaacaaacaaactgaacaatgtgatatgtttctggaataggtggaggaaagacaatggcttttttcagagagaggtgttgcatttatttgagttaatcctgaagttctctgaaatttggcaatggtagttttatgtttcaattcagtgactgctgtttaaactgcaggattgatgcacaaatgatccataacacattttggcatattaaatcatcttcacagttctaatacatcatgaaacccaatttacatataacgtaggcacagaagatgaaaagctgagaacagacccctgtttcaaaaggcatcaggcacactactttattttcttgaagctccagtaacttctataaatccatcgctggaaaaggttattaaactgccaggcccttcttctttcttctcaatctttaattcccctcctcttctcacatgccatatggaaactcttctctccccctcccatttttttttcatttttattccacagctcctttcccttgagctgaatctctcaaagtcatggaccatgataaacataatttttctctttctgtttaaacttgtaatgtatttggattttacaattttatttatttatttttgtctatggtagctgtgacatagcaatagatgtagtggacaagaaggcagcttcatcagattctggatctgatcttagaaatgtagcacctggataataacacaaggtcaaagtgtgaccagtaggcacgatgtgccattatgtcataatatcaatttctactgtcattatagacaatagactttcagcctaccatccaggtattatgagctatatggtatacagccaaagacatcacaggatggacagagtgcaaaaactggcttccaccacatctcagaataaataattcctttgaattagatcagtaaatattaaaatattacttaatcatgtctcttagaaaaaataatgagaatgttttatgttctattagaattaaaatcaatgtcctctaccatcattgtcagttgcttggcactagataaaaaaggcattgtgtctgccaaaattttcctttcctccagggtccttagatcagggtttctcaactttggcactatgtgcgttttggggtagatcattatttgttttggaggtttgtttggaggttgcaaaatagttagcattatgcttggcctatgctccctatgtgccaggagcatccactgtagttgtgacaccacaaaagtctctagacattgtcaaatatctcctgaggcgcaaaatctctcccagttgagcaccaccgtcctagatctataaggcatggatctttcatctcctatttctttttctcctcttgttttatgctccaggctaatccctgccccaagcgatatctacctgtccccacctccccacatcctcttggttttctgaaatagattaataacagaccctctccacatcctcttggttctctgaaatagattattggttacctgaaactatctttgaaatgcctgtgtaaaccacaacagattcccttgggcctcaagggagtcacagaaaagtctgaagcaatgtagaaaaaaataaagtagctagaaagtgtgaggaatgtctgtctagctctctaggttgctgtattggggaatcaagtttacattggctgctaaggtttgactatctgggacaatttgaaagtaatattatggggttagcttgaaactcccctgaagaataaaggacccaagtttatatcccacaaaacttttcttcttgtggaagcttaaaactcttattgatttcctatgaaaattattcaccttggatattccataacctttaaaaattatctaaaccttctaagtcccaccctgcttggcctacttactttcagcaggtgaccacatctttgattttaaactatggaaattgaggagaagatccgactcaccctgacatcagctttctttttaaaacttcttcctttgttccttaaaatatctctttttcctacctctcagctacacttgtcatttccccattccttccctttacttcttatggttgtctccggtttcattggctgagattgttctcctttttaaaactagcccctcgaactgtatctatgaccttcagcctcttattatctgctttctttacatcttccaaagatggtaccatcttattggtaccttttacttttattggtaccttccactgagtctacaaatatcactgcccggcttaccagtttgcctatccattaccacaagcttttctctcgtagtctctccatctcctttctgtcttttctctttcctttccttttctcccaacagatgtctcaaaaaaataacctatgctcctcactttaactctatgcctcccacaccttgaatctcttgcatggttgtttctatcttcacaaatatgctgaaattgttcttgctgtttaacagtgacaatttaaccattgaacctatggaatttttaagccttaatatttggagatttgacactatggtcactttcttggtttttcaaacgttcttacatcctcctgattttttatctgttacctttactgtttcttttccctgctcttgtcgcctagtactctaggcaaattaactcaagcttcagatgtctgcttttctgtctaatgtatccagtcctgaacaccacttccattcagagatgccaatgttgttataaaaataaatttagtgacttcctcttaacttagaagtggcatccattctcctctttatatgattcttttttcagagtgggacaatgtctttaatcacctagagtggaacctttggaacttagagacctatttggcccaagcaacagggctataatttcatgatcctaccagaccctttattataaatactgatgctaagctgaaaggaagtagaagttttggaaggggggcatatattagagcaggaatttttgccagcaggagtctattatatagatataacagtgtgcatgtgcaagggtgggtgatggggaagaaattggcaaatcatgagtaatatttaaaaacgtaagtcaaaagtaactatatataatatctagaaatttatagatcagtgcaaaaatcatccaggagattgaaattagctctggaaaaagaaaaattgaaggatctgatgaagcctgatttaattgtagtaagtatttagaattcatcgaccctttaaattacgtacgtgtaaataaaatccgcatacctaactaataagcaatatcatcagcattaatagttaactatgagaaatagagaagaatgcaggatgtaacataaagaaaacttcttgctgtgtagaagctttctgggctagatggaagagtctgaaaaatgaggaagggaagaacaaatgagatgagatgccagctaggtgctgattctcttgatcagtctatatatttgaaagccatgggggtgggtggagaccatgagatggcttgggaatcttggcactaagattattaagtcattaagaaagaatatgttccattttccactgggagcgttggttgcctcccttccaccttggcagccacagcaaagtagaaatggtatgttaggcaaagaacagggccttaagatattccctccacctcagttggcatggtattttgtagaaggaaggagaaaagttcttaccctgagatcttttctgggcctcactgggcctcatattttaagggggtatatattggtctttttctgatcaagtcctgccctaccggaccagaagtccattggaacaaagggacttgcccatacagaacttaactccctcccaccattctaggccatgctctggacacttgagatcctagaaactctgccaagactgccctcagcctgtatctggactttgtgtgtctcttcctgggtctattgctggagggtaagtcatagcaccagtgtgtaaactcctagatctgaggggtggccaagaagtggttatttgtgtgtgtgttgggggaggggaggtggttgccatggggtaaacatgggagcttaaatatgtgtgtgtgggggggatttccacacaagtgtgcttagggtcatggggagaaaaactagagatgggaaatgtattaatccgttctcatgctgctatgaagaaatatctaatgggtaatttataaagaagagaggtttaattgactcacagttcagcatggctggggaggcctcaggaaacttaaaatcatggtggagggcaccttttcacaggggggcaggagagagaatgagagccagcagtggaaatgccagacacttataaaccatcagatctcatgagaactcactcactctcatgagaacagcatgtgggaaaccacccccatgattcaattacctcccactgcgtccctcccatgactcatggggattatgggaactacaattcaagatgagatttgagtggggacacagccaaaccatatcagaaagacaatgcaaaatgggtcataaactggggtttgctttccccctgccaagacatttcagcatagaacgacaagtaatctaataattctaaattaagatgacctaagtcattataaaagtatacttgtcaaggtaaaagtatagaatgtattttatttcacaatttgtttgctcaattaataatatgcaaatatttagaattaccatatgtagacctccatttgtgcttttgccctgagccctgcaagtgttatatggctggcctggaggagagattcagaagctgctccagcagtcagtggcgagtgctagcatgctgggaaggtctgtggactgcaagatgttgggatcaagataaaggaggaacaatgttcagaccttgtgactggaggccaaagctgagagcagcttgtgggtgtgaaggtcaagcaggactagttacagcaactgcagcaaatgtagcaagggcagaggccaataaccaacacacagaggccatgcagcaggagacagtttgggcttctaacaagaatctggaggaagaaatgaaggtcagacccgtcacacacacacacacacacacacacacacacacacacacactccccacgtggcactgtggaattagatgagatccttttgtaccctgtaggtaggagaaaggagaaataaatcttttgagaggttagagcagccacactaaacagattaaactatgaattgaataactttaaaacttaaatgtgaattaacctttaacccaaagagaatattttaaacaggttgtaattggataaactaccttaaagatacataatattattattattattttgctagtgattaaagagtgattcaaaggtctgctatggaaacatagcactgttacatttctgtgcattggattaattaatgtaaactaactattaataccctgcaatatagactcatggataacttcctggagaaactgcactgggtccttgtcagggtacagtatgagattaatcccatgactatataccttggtagcaaatagctcattatatccaagctgtagatgaattctaacttcaaaggataacataaaggacacaaagacattttaaggttcacagtttggagttccttgccttagaaagtaagatagaaagttaaggctgctttctgagagcgtttttctagggactactaactcctaggccttgaccagtccttgtgagccccagacacactgtgagccaagagatgtgacaagaggaaagatccaaagttgttaggcaaagagagcaatgcctgctggaggcagttctattgcattatttgaattgaatctgatcaacagagaactattctgtgcactcaactacacagtattaagacattataaatatatgggctttttgtcaaaatttcagatctacctatctgattgttctgatttcttgacttgatggtgtggatgacagagaaagtgaaattaacctacaacatgattacttacttcatttttattatttttcctcttgagaaggctaaggatgtcaagaatgttacttgctcttacagtgtttcataaaagaccctgaaaattaaagtagttttagaaactatacatagctccaacccacagcactggaaatatattaccctctagcagtaatagcatataagtgtttaataagtgttagttgaatgaatttgttgaatacgtaggtaataaacacacatatagacatatactgcataaaagtcaaacatcaaaaactcgtgggatatatttggtaaaatagataaactcaggatttgggatctggtaactcccataatttcttagacactgtgtagaaaatgccttttttactatgtgtgtttcttgcatgaattcatcttgatcagggaaggtactgtaatacattgtgggaagagttttagttggccagtatacaagaggccagaagatcaattcattgcaaccccaccatatgaaagccttttcctgaaaatcgtggagataccacaaccattttgtcttcaattgagggggaaagtatgaaaatataaaaagcacgaacatcaaacctgggggagatttaataaggcatgaagtggttttggtggagcattgcatcagttgctggtaaggtcccatgaaaggactgtcaagcagcatggagggcccaatgaggacagagactacaaatccttggtggcaccatttcacatagtggtgagattttctccagcagcactcagcaactggtgtttagggcattggagataaattaatgactggagttgttggggcttcactgggtggatatactgcattgaacattttagggagtgacaagttgtggctagcttggcaggagagtgctggctgattgagagaaaatggaacagtggtacaggcctgcatttggtcaaaagtaggcatggggtgagtaagggatggagagagctgaaatggtgagaggttatggtccatgaatggatactggcatttaacaggcatagagcatttcataatgatgtcaaggtctattacacagccatgtatgagccaagcaattggaaatggaagatctgaagttaaagatatcatggaactatgaggaaaatacatcaaatatgtcacctagatgtctaattaaattacctgggatgagcagaaattgggaagctgacaagttgaaaggacatatgtgactcaggtgcccaaactggaggttagtaaaaggtaccaacaagatgtacagctagttgacatcagccccaaagggcaaatttttgacttgcagaggaacaatagggtagtgtaaaagcttcattggtgggcacaggagatactagtactcctctcttcattagaaaggtctgcatgggaaatcagctttcagctgaagcaagaaggtggcagaagcatgctgtaaagagatttgcaatggagggttttgtgccatagaatgcaggttgcagaagccccaactggaaatggcaggaagaaatggacaggcagaaaagtgaggttttggactgagagtaggggagagggtagatggtcaaagggacttgaatattgggcagggactgagaatcaacaggaatgtgaggtctggtaggattagctgctttctgggatctaagtggagcaaaggtacaaattagcttctgtgccagtgttggctcagtccatagagggtgttgtcagaggcttcatgatattagcaaattgtgtttttttctcagttacccaaacagaatcttggtgggaagcttttgtggtgcctctgaagagatcattgttcagccatacacagataaagagtgagtgtcctctgggggcaggatggctctgaatcctctcaaaaggcaactatggcctgactcagtagtccttttgaagaaatcctagccaaggatgaagggacaagtctagtttcgcagctgagagaaacaagcttagttcttaagtgcaagtgcagctatagaaaagaaactatatcattgatgtgaagctaactccttgatatggtttggctgtgtccccacccaaatctcatcttaaattgtagctcccgtaattcccatatgttatgggaggaacctcgtgggagataattgaatcatgggagcactttcccccatactgttcttgtggtagtgaataagtctcatgagatctgatgtttttataaggggtttcccctttcgcttggctctcattctctcttgtctgccaccatgtaagacgtgtctttcaccttcttccatgattgttaggcctccccagccacattgaactgtgagtccactaaatctctttttctttataagatacccagtcttgggtatgtatttatcagcagtatgaaaatggactaatacactcctggaaaagacttttcaaccctactacccccacaatgccatgagtgttctggatgaaatagtacttctttgttgtgtagtataaatgaatttggaataaatatacatggatttaaaataatacattaatttaaattctccaggtagaactactttgatggaaatttccctaaaaaagcaacaaatgatttgcctctgcatctaatcagccaatcagacactcccatgctgattacttaatgaactggaattttaatgcaaaactttgtgattatcaacaatttttctgttccccctacccccaaaaacccaaacactttctacttataattcttaacaaattagtcttttctttaaccatataagagcatttgttaatcaaaactgaattcctagccaaatatctcagagcagcttgcaaagcatgtactcaagcagataagaaggtgatgactcaccaagtggttctgtatttactatcaagaagaaaataatgcaggtagatgtatcaagagaaaataaaaggccaaggactatttgagaagtctcgtggcagactaaagagagaatacaatcacatccatctatggaaaaggtttattctatttcaacttgctattttgcttaaattccaaaggattatcttcacagtgagaacagagatctaattttggctggggaagtgaaacaaggtggtggttctaggcagaacttagtggtttgtcattgtacgttttgaaataaataagagttcaaactaccttgatagactgtggtactctaggatactgtcagagctctttgctctgacttttatctcttaggtagaattcaaatgtggaataaaactgaggaaatgtgggatcaatggaagacaaaatagtctgtgggccttaagttctaaatgaaattattcatggaaggggtctatgtttgttatacagatagaatttgttttctaatgaagagacttgttatctatataattacttatagaatcacatagcaagtttcatgaagtaaataaatcctgtctatgcctcattttaaaaataataagcatgattcttttataatccatgtattttggttagaatgattttaccctacagaataataacacctatttcatgggcagagtgtgagaaatctttcagctgatagatatgaagcatgtgaaacggcacctagttcccagaagtgtacaataaacagtagctattatcactaacactctagatggtaaataatccccttcttacaaaagaggagcttggatttgagagcattttagtgacttccacaaggtacaaattaaatcaccagattgagagtgctgccaggtcatactgaaattatctgaactgtttgcctactcctaaatctatttccagactcataaattcaaagccataattgaaatagactcacatgcgggtagtcagaaaagacattgagcaaaatgttattaaatcacattttataataaatacagctgcagcaggaacaaaatttgagatggaagccactcatcccatcctgatgacttagatcttttgctgatgtctggagactttgcaagaagaaactgtcaagggtctgtttgtaagaacaaccaaagaccagcaaggagaggaatttgctgtgagaaaacacagctctaaggaacacaaaactggttctataatcagttgttgtcaaaggagagaatttttgagtagcctggtgaatagcagtgagtctgccctacagatccaaactccctgagcaatcctgtgcctaagggaagaaaaggaagcaacagaaaaactccaggatcagaaaaatctctatgagatcttgagagtgaagactagccctgcacactcaggaatagaatatgacatttgtagtgtgtaacctaagtagaatggaagatggtttttctcagtggaagaggtagctgttagaaaaattggaaattcagaaaacaagaagtaagagaagcctaaacacattggaagtggcatcaagagaggtcctgagagccctgagcaggaagtcacaactctcttcatcaccaggatagcaaagggggagcccacattccatgaagtctatgttccaaggtagaagggggaagtagtagatgccccgtgataggcaggagagctgcattgggtgcacacataaaatgagaacttccccccaaaaattagaggaatttgagggggagtcgagtttttagaattcagcaggtgagggatgaaccaaactctgtttaaacattattatatggtttagattttcctacaaactgtgaatacacaattaattattattttagctttgtgaacagaactatgctagcactgtggctatgacagggagtgaaatatggtttttgctttaaaagacttacagattttgggagaaatgtaagctccatgagggcaggtgctttatctattttgttcatttgtgtaccctaggacacagagaagtacctggatggaagagatggaagagacagttatcaaatatttactgaaataatttttaagtgatctaagttaaagaagaattttaaagagtgagttctattacattctttttgtttgtttgtttgtttttgtttgagggagagtttcactcttgttgcccaggctggagtgcaatggcatgatctcagctcactgcaacctccgcctcctgggttcaagcaattctcctatttcagcctcgcagctagctgggattacaggtgtccaccaccatgcccagctaattttttgtatttttagtagagatggggtttcaatatgttggccaggctggtcttgaactcctgacctcgggtgatccacccacctcagcctcccaaaatgctgggattacaggcatgagccactgtgccaggccctccattttttaatgtatacccaagaagactgaaaacatatgtccacaaaaagatattgtacacgaatgttcagagcagcttcatttataatagccccaaagtagaaataacccaaatggatacaggtgaagaatggataaataaaatgtgatatatctatacaatgggatattattcagacatcaaaagcaatgaagtgctgattcatgctacaacatgggtgaaccttggaaacattatgtttagtgaagaggccagtcacaaaagtccacatattatataattccatttatataaaatgtcaagaataggcaactccacagagacagaaacataagttgtcagaaggtaggagaagggccttggaaaagggagggacagctgatgggtgtgaaatttctttttggggtaattgaaatattctaaaattgatcatgataacaattgtgcaactttgtgaatatactaaaaacctttgaagtgcacattttaaatgaatgaattgtgtggtatgtgaaatattaaataaagcaaaagagagagaaataaaaattaaagcaaaagagagaaagtgatatcttcaggatactgtggaaacacatagaatatactactagaagccaatgcaaaagtaagttattcctactttaaccttaatttatcctcctacctagagaatgttgaaatgctgctcttacagagatttgctacagatgctaagtgaaagaaaaatctcattcaaaatgagattgttttctcaaatcttcctccttcacattgggggtcatatggcttctgtctgcagactctgtcctaccccaggaattagaccaatcttgaccttgatcaggggatatttattgaactctagttcaatattgcatggacttagtatggtttctaccctcctgttagtttggtcttgatctaagcatttgaatataagtcctattcctgcatctaaatctccaagctgtccttgcagatctggatctgtgcctttttctctcatgcctaagcacttagcctaagacttagtgtgttcagactgaagctttgcctggcttttcagggctttttccagggatgaggattttgtccttgattgtgattgggtcttggtcagacttctcagatgctaaactccatccagcactcccctgtgccatgcctgtaacataattggcctttggcgatgccgtatacttagctgaatgctactgctgcctgtccccaccctcctccctgcctatctgtgtctgtgaagatacagcattccaggggtctggttggacttcctcctgccaccgttgtgctgctttcttcctcccaacttcctcactcccacatcacagaggttccagatcatcccagtgacaccaatcctggtacaactaacatttttttatatctagatggttttcataaaaataaaaataattttggttttgataaaatgtatgctttttcattcaatttatcctgtttagagattcagcagatgtgtatttattaactcaacattgaatgcttactatatgaggagtattgtcacaaacgtgggaatacacacagctgaaataaaatgatgatgaggatgatgacaactaatataggtgaatattcaggaagtgccctccctagaccaaatgaggtagattatttcatttatttttcacaacaaccctatattttacattgtaacatgatctgcgttttaaagatgataaaacagacacagggagcagcatgcccaggattcaaatgtaagatgacctgattctttatactaagctgtttattaaaaaaaaataaattttattgtgtatatttgaggtttacaagatgatgttatggggtacatatagatagtaaagtggttgctatagtgaagaaaattaacatatctatcatctcacatagtttcttttttatgacaggagcagctaaaacttacttacttaacgcaaatccctgatacatttttatttattcatttttttttagacggagcctctctctgttgcccagattggagtgcagtagcgcgatctcggctcactgcaagctccgccccccgggttcacgccattctcctgcctcagcctcccgaatagctgggactacaggcgcccaccaccaacctggctaattttttgcatttttcatagagacggggtttcaccgtgtcagccaggatggtctcgatctcctgacctggtgatctgcccgcctgggcttcccaaagtgctgggattataggcgtgagccaccgcgcccggcccctaatacatttttatgaactatagtccgcgtgttgtacattagatctctagaattgtcattctacatatctgcctctttgtgtcctctgatctacaaccccccatttcctccccttcttccctgccccggcaaccactgttttattcgctgtgtatgtgacctcttttcttccttagataccacatgtaaatgatatcatgcaatatttttatttttgtgtctgccttatttcacttagcataatgtcctccaggtcaatctgtgttgtaggaaatggcaggatcccattctttttaaaacctgaataatattccagtgttgatactaagctcttaatcggcatgttatactctccagagaacttaggttctaatgacattcaaaaatagtgtgcttagttatcacgaagcaaacttagagtaagataatattcagtcttaaaaagtctgttgaaaggactatgaataggtttcctactctcattcctacgatgactcatccagggtcaagaactagagtttcacaagacagggacagagaccagaggtcaagtccaaggatgttgtaaaggcagggaggagcaggtgagtcctacatgtccaaacaggcccacaggtgcacagtccagggagtttaatttcaaaaatatgggtgaggacttacaggagaaatcacaagccagtctgagctacaatatttatgcatctaggcagagtccctgagcaacaaatgtggggtatcaaggttaataatgagcatgatggtgagccagagctctgcaatgtgatatgagccctcagaattccttcccaaatcctgtgatgacactaagacaagtcacatttaaagggagcagactacctgattgcagtggggaagtgaagggagcaagtatttctaccaagatgtgtatctgctaccatttaataatatagcctccaatgaagaataacctatatctaaaatcagtgaattagattcctctaaatgccccctttgacttaaccacaaacagaagaaaaaaacatcaaaagaactagaagaatcagtcaaatgagctaaggcaaccttgggaacatcacagaatattcaagggcagaaatagacgaatagctccttttgcagctgtgaggatagctgctgactgctgagcaggataagagggacaccagtgtggggagaaagcacttgagcctgactgaagcttaggttagggtcaccagtcagttagtctgcccataaaagtccattcactattcatgccatgaattaaactttgtgggatctctaaaatagtggatttaaaaaaattgtttctcaagctcaatttttcacctaaacaagtattccctccctgacttcagttctgggaggtaaataaacctccaagatagtagcatggaatttgcatagtgataatgatcagtaagtcaggtgggatatgtgtagttgtgcatttattcctaactacatagctgtatgttaatacagactgcaagaatgaatggtaaaaagaggccctctatttcttcttctttggttgtgaggccactgatgataaaaggacatatttagataacttgcttttaagcagtaaacgtttattcagcaaactataaatcaggattcttgagttctattacctcttccgtttcacctattctcatgattagaattttgcaaatgatgcaccttctccctgcctcaacttcttttccaactaaagactcccacaaaacatgccatctaccaaattctcaggaggaaagagaagagcgattgcagccataacctcctaacttattcagcacaacctccgccagcaacctcattctccctctggcattcagaggactctgatgtaccccttgccctcaaaaatgctatcaacataatgaaagttgagatgaaaagtaaccatttagtgagctttctcttgcatatgttttaaaatcttctgggagtcagaagaatctgcagaaccttgagtctgtgctgggattcactgtggctgtaccatatggggaaacctgagaaaatctatgagaactatttattagggagaaatgggatgatgccattcctcaacatttaagatcaagaacctcaaactgagataggctttctgcctctaatttcccataactctctgtttataccattctcttcccactattgtctcatattttctggttcggctctttcccctactagactataagcttcttctatgtttttgtatccttagtgcctagaactgggacaggatataataagaacctaatggagttttggtgaattaatgctactttaagaagaaagaaaaggggtcctgaatctaatagtgtttgggaagtatacactagggatccttagggaggcccagtgatctttacatcaaggtttgctctcagccctttgtgataaaatcaattcagacatgtcttcaaatctactcacagacaagagatggaataataataagggtagctgatatttttatagttcttttgtttatcatgtttatttttatggcaattttttagaaacaatttggcaaaactaatgattatcattttaaagtaggcaagaagaaacctagttatagaggacagaaatctagagtcaaggattcctgactcctaatccagtgctctttccactatagcccactgtgaaattttggaaagagtggaaataactgtttacactaaaagaaaatgaattttggatcccgatcaaaatgtgatattgtgggtctctgcaaaccaccttagttgagaggtagtcatttttcatttaggggccagcacttctgtagctaaaaaaagtcagtgtattcatgtgaaatgaagaatgggaagttccctgaaaaggtttgaaggcttaattcaattgatgttggcacaataaactctaggactcatccaaatccattatgaagggcttctcatgccagcagatttgcaaaagtagatgtggaattgcaacaagttctttctgctgtgtgttttaaggtagagtgacacgaatctcctattttcacatgagagctaaagagtatgtttctttaatactcatcttcctgtgtgagtgatattctaaggaaaaacaaaattaaaatctctgactcttggcttaccctttcagtgtatatagcactgaaaggctttctgattctccacattacgatgggatgcacacatgtggttttggtaatgtggaatagagactggaggattccatcatcccatatccccatggtctttgaccaggaattacagatatcagggaaaaaatggaattacttggtgctactttctaaagccaatcttttagaattaggtggactttttaagctaaatattttggtcctttttttctgctacacttatgataatatagcttagttctgactttttcattacttttcctcattaactttctacaagacctaatagtgcaagaaagggctgaattcactgttcacagtcttgtttttagacattccaaaaataaaaagaaatacggaataattttctgttaggttgatgagagctacaagtaacagaaaaccctaaaaattgacaaatgggatctcattaaagtaagatcttctgcaccagacacacacacacacacatgcaaactataatcggagtgaacagacaacctacagaatgggagaaaaaatttgcaatctatccatctgacaaaggtctaatatccagaatttacaaggaacttataaaacattccaaaataacccaagcaacctcattaaaaagttggcaaaggacatgaacagacacttctcaaaagaagacatttatgtggccaacaaacacattaaaaaaagctcaacattgctgatcattagagaactgcaaatcaaaaccacaatgagataccatctcatgccagtcagaatggtgattattaaaaattcaagaaacaacagatactggcgaggctgtggagaaataggaacaattttacactgttgctgggaatgtaaattagttcaaccattgcgggagacagtgtggggatacattgaagacctggaactagaaataccatttgacccagcaatcccattactgagttatacccaaaggaatataaatcattctactgtaaagatacatgcacgtctgtgttcactgcagcaccactcacaatagcaaagacatggaatcaacccaaatgcccatagtgatagactggataaagaaagtgtggtacatatacaccatgaaatactatgcagccataaaaaggaatgagatcatattttttgcaggaacattgatggagctggaagccattatcctcagcaaactaatacaggaacagaaaaccagcaccacatgttctcacttataagtgggagctgaacaatgagagcacatgaacatgcgaggggaacaacacacactgtggcctgttggagggggagggcaagagagagcatcaggataaatggccagatggctaatgcatgtggggcataatacctaggtaatgagttgataggtgcagaaaactaccatggcacacgtttgcatatgtaatgaacctgcacatgtatcctggaacttaaattaaattaaattaaatatttaaaaaaatgaaaaacagaaaagtttgattcaacttgcttaaacaataagaatattaattaccctggtaaccagaaatgcagagattcgacagctctaaggcatggtatagtcaagacctagctttgaacccctctgtgccttagattctcttatgactagcttctggcaggcttcaaaatgtgacatgcagatacagcaatgacagaaggtcagaaaaatgggtccatttcttccacatactgctttcaggaagaaagaaaaatttcttagaagatgtccttttatagctcattggccagaagacacgtttctcatggtcatgctgaaaccaatcattggcaaaagtactgtggccactgtgtttggtttaggccaattaggaaccacccctgagactgatattggagtcaatttccttcaaattatgaccacagagaaaggtagatacatgagaaaggaagaagttgatgtggtagaaattggggagatgaattgatgttggacagatgaccaatagggtttgttacaaggtttattcagaatatttgacattttttaatatttataaattccagctttgtcactgcctctgtcacacttactattgagtatttaatatgagctgtactaggacttcaggattgtcttaacttgggctgcgatgacaaagtatcatagactgggtagcttctaacaaccgaaatttatttctcacagttctggaggctgggaagtccaagatcaaggtgccagtagattcagtgtccagtgagatcctttatctgattcgcgaatggctccttcttcttactgtgtgctcatctggcaggagggactaaatagctgtctgcattgtcttttgtaagggcactaatcccaatcatgagggctctgtctccatgagctaaatcacttcccaagggaaccatcacctcagaggttaagatttgaacacatgaactctgggggaacacatggcaaggatattcagactagagcatggatatgaagattttaaaaggcaatatttctgctctagaagaaaatatagtcttttccacactgttaagaaaaggcacaacaaaagaaaacagtgagaatgtctatcactccaaaaaaaaaaaaaaaaaaaaagctttttaggacctgctgttccactaattaccagaagtaaattatagcacttccatataaaataataaggaaataagagactagagtttcacctattttcataagcacatcatttattataaatgcaggtggatagagagggggagaagttaacaataagattccactggccccatatgaggcccatggtattatagaactaaagagagctgagttttttaattgaaaataagataagtaattatcttggattcttgttctaagaaggtagtaattagagtggatccccactccagggtccacactcctggcttacaacctgatagaactccccagcttgatgttaacagaataaataaaacaatatatccccaaatccatggggaaggcaagaacatgattggggattttaaatcctgtaattcttggattcagagtatggaaaatacaggtaatttcagtaagagatccccactgttagaatctataacaccctatggtgtctttaaaaagaagaaaatgcgtcactagtggctcaatcccatactcctttaaaatgtgttaagcttgacaattcaagctgatggcaaataactcctttctcaagtaatgttttaatctgaaagaaatatattatttaaaagggaaatccccattaatgccaagatacggaaacaactacttagaatacacagcaacatgaaagagtaagataaaaggagagaaattgaacatcaaacatgttcctctaaaccagaaacagaagaaagtgttctttagaagattagacaggtcttgaatttttattgttggcaaagaacagtgtttaaaggcaagagctcaacctttctacagggcagtgtagtttttaaattcgtggagcaagatggtgacactggctgtatgtactagcataaagaattgaaaacaatatgacctgaatgatactcaaaaactgatatattaaagactcatgttgagagacagatcatgagcagagccaattttgattttaagcataaaagtggatatgttgttatgaaagtttaagtttgagtatcacacttatgaaagttaagctttgaatgtcacaagatattggggtaaaggaaactgaagagtcatctagtttaactcaaattcttaagtagagaagagggtatgaggcttcacaatgacaagtggtctagtttacaggtaattcttgtccctatttgtaggacttcctgggagggtcaggttaagatcccaaataacaaaaaaggaagaaatgaaatgagaaattgcttctgcgaaacacaattgtatagcagctaaattttctatggtttaaatgaggaatacgtaacacatgcacacaaggctataaattcttagccttccttgctaactttgtgtgaagaatagttatatctttttgtaaaaaatatgctttagcatcagaaccagaaagcctgttgaatcttagtaaaagcactaatactatttccatttttatttctcttccaattttgtataaaaggtacattttcattaggggaattgggtagctaattctcttggaaagattcagctgtcactgagtaacacaatctttccccgccctcctcgcccaggctggcagggactgtgcttcagctaataacagtggctctgctttgctgggatgcttcgagctgctgtgacagctgacaggagagtagtaaccgctaaggtgtcaagccatcctttccccaattccatttgctttgggaatgtgctaagttgaaagtccataagagccatttaagaacaagtattagtagatggtattataggtttctgttcctctacacagtccatttaaggaggaaaaatagtttttctaataccatcttaagtgactttacggttatcgatacaaaacaccttggaaaaatatcccagtgcatatgttatcttgatgtttaagcaagagaagatttacaaatgtttaaaatttccaaatgttttaaactttctacctaaggaatagcagataatatttttcttcagtaaggggtcacaaaatattaatttgatacaagatataacaaaaagtcaattagatttccagcgcatgtagggttatgtcttctgtggacttaaaacattcttcatcaacacttttttttattttggagacagaatttttgctcctattgcccaagctggagtgcaatggtgagatatcacctcactgcaacctccgcctcccaggttcaagtgattctcttgcctcagccccccgagtagctgagattacaggcacgcaccaccatgcttggctaattttttgtatttttagtagagacagggtttcaccatgttggccaggctggtctcgaactcctgacctaaggtgatccacccgcgttggcctcccaaagtgctgggatcacaggcgtgagccaccgcaccaggcccaacacttcttttcatcttggatgtgataatgtgctcatgaagggttgggtaaaatccacaaatccacagattgcaaagcactgtggaattgagttaagcactgtgggaaatcaaaacctaatataatacaattcctattttcaaggatcttcctgattgcaaaaacaattatatggaagcttaacaatttctacctaaataaaatgacgattttggtatttcagagagccagcatggttttctagactgagtgctcacttgccttgcaatcaaatgcttcaattaacatctacacactgacacttactcactttcctcattcataagaaggctggactagattatttttaagttcaaacatttcgtgatttacatctttaaaatatgtgcttttttatagtgatttacaatgcagctaacaggttagattagtaaattatcaaaaacattacctaagatttgagtgaatttagattaataaaaaagttttaggttctaacaatgttttaacaatgattttgaataaaaacaccttgactgtgtgcctcctcactaactaaatatttgtgaatgagcgtattttcattatttttaaataagacaaactgaacttctatacagagctgctatttacacatgaggtgtttgctttttggtttatcttgctgacttgggccaatctcccaagcggttttaactgaagacaaggttatcttgccatccttgatttggggcaatcagccatcacaaaacaattcttggtaataaacattagaaggagaggcctgcaagcagctccagtatgataaataaggatatcgttttccaaataggaaacaggaggaggttaatttaaaataaaccactatgaggtttcttacagagttatcatcacctgcctttcaaaataagcatactcattacatgtgagggcaattgttcatctgaacatcttgtttacttgtctgattgttctccccaggtataatgattttcaacaggtcaatcagtggttctaagcgcttttcaagcctatttaacaggataatttggtcaaagagcacatgttatataaattgccctcccttaacattccccatcatgaaggcatgcactcaagagtttcatgcaaacctgtctttacatttgcctcttccactttcctggaaagttggataagttacttgaaattttttagtctcatttccctggtctagagtttttcaggattggggaggttgagtcctaacactgggacagtcccaggcatctgttcaggctcattgatgacggagagggaaggagacagcatctcggccacttcatgataacataaataaatcacataactgatgaactatgtgtaacataatcttaatctggcatttattttcagatattaaggttaagtactatatcaattttttaaaagtaaaaaattatttctacctgcatagaaggcattacctgggttgattgattgattgatttagagacagggttttactctgtagccccagctaaagtgcagaggcacatcacaccccactgcagcctctgcctcccgggctcaagcaaccctccctcctcagtttcctgagtaggtgaggctacaggcacacaccactacacccagctaatttttgtagtttttgtagagactgccgtgtttcccaggctggtctcaaactcctgggctcaagccatcagcctgccttggcctcccaaagttctaagattatgggcatgagccactgcacctggcctgattgtattttatttttaaataagccagttcatgaataattaaatgaaaacattataataataaacagacaaaaagattgctaaataataaatctagtttataactaatatatctatctcacttccttaaattagttttcaatgcccttaatttgtatgtgtgttaacatctctcaattttcaaaaatttttagttttttgaaaaatagcatggcaattgaaagactgatttttaaagtgaacaaaacattgactcccagaagaaaaattttaatgaacaaaacatcgatttccagaagatgaacaagttcacatgttcatatgtaatcaaaatatgtgacactaattataggtgtatttacacttttcaaacaccaatattaattcctgaatacatatgctattaagccacttttgaacacagaaaagatggctaattgataatgtatttttgtagcaaagcaagttttcatgccaattttacattttgggattcattagataataacctccattccttcttattaaacagaaataaaagcatccaatatacatgcttttctagatgtggaaggctacatttgacaatcaattattaaagtaaaattaaacctggctttgggaggccaaggcaggggcatctcttgagcctagaagctcaagatcatcctgggcaacatagtgagggatccagtccctaaaaaaatatataaaaaaggcgaggtgtggtggcatgtacctgtagtcccagctactcgggaggctgaggtgggagcgaggcttaggtccaggacttagagcctgcagtgagccatgatggcaccactgcactctggcttgagcaatagagtaagagtccatctgaaaaaactaaacaaaacaaaataaacctggtgttgtctgacaacctaacttttggaactaacaccagtccatggggagtcctgagtggtatcagaaaaatgccatttacatcagataataaatattcagccctctaccacaaatcctgcacagaataactcaataaatattagcagcaatgacaattaacaactgctttcagttcagcagcttatggatccttgatattcttagcttcctaatcgttagtaattccatcaccttttaatgaatgagtcagaaatttaaacagcaaaagggagacaaggcaaaactaaacatctgtgaattttattaattattagcaattccttataaaagccaagaggggaccgggcgcagtgactcacacctgtaatcccagcactttgggaggccaaggcgggtggatcacctgaggtcaggagttcaagaccagcctggccaacatagtgaaaccccgtctctactaaaaacacaaaaaattagctgggtgtggtgggggggtgcccgaaatcccagctactcaggaagctgaagcaggagaatcatttaaacccaggaggcggaggttgcagtgagccaagattgcgccattgcacttcagcctgggcaacaggagggaaactctgtctcaaaaaaaaaaaaaaaaaaaaagccaagaggggattagagtggccctaatggttaaaatcatgactaaaagttgtttaaatgaccctttcaatgccattccccttttgcactgtttaatcaagaactggttgcagtggcatatttgaggttaagaaatattgagaaaaggaaaaggtgtatgtgtggtttctgcttcactgggttgtcaggagaatggcaataacataaccatttaaaatggaaaaatggagcagtaggccctactctgaagaagataggacatattttcaatgtttcctgaatgttacaagacataagaacagctacccggggggttcctatcttgaagactggaaaattatgagcaaaagcaactagcaaaataaaagaatctggaatatttatcctcttatgatggctagacttcagacttcctgaaatagcctttctcttggcttctaagccactgcttctcaaactttaatgttcatacaaatcacccagggatcaggtgaaaatgcacattctgattctataagcctggggtgcagcctggtgttctgcatttttaaccagctggtcttcagactcttcttgagtaccaggcttctgtcttacttacattgtaatgtttcttatgctcatggtgacggtacatcctgtactctttaacatagcctaaattttattggtatttcattattttcagcaaagtcaattagctaactaaattgatttaatttttataccttttggaagctgttcatataaaagatttccctcaccagaagtccaatgtcttgacttggggttttagaagatggtcttatcacaagtgacttagcaaagattacctctctctctcttttttttttttttcttgagacttctcgtcttactccagtagccctttgtgtatctgcataacaacttgactggaataaagtaatgattattttctatcaatcaaggctaaatgagtcacctatgaagaaaaaactgttcagatggactggagccctgggctaggtattacaactggaaacaagggagaatgtgatttaggaaaccttcctaatggtcataggaattgctttcttttctatcaaaaaataaattgaagaaaatctcttctctggtctccaggctgcaagctctaaatcttggcttcatgcattaatgaagttacacttcactcaggagagctgagttaatttcttagtctgtcactcactagctgtttgacattggtcaagcaaaggtcataatcacctttgagaacttctgttttcttatttttttttaatgagagaacaaagttagggaggcaactaaatgcctataagctcttgttcaacttcaaaaagaaaatataaatatatggcatcaaatctgagctcttaccaaattcctaagggcttgatattctgattatgatatggtgattatgatttgattataatttaccaagcagttgataagaaattgttatatgtaatccaaagcaagcccttgaaaaccttgtgtctcccaaagataattagaaactaggattatccaggcgacatttgaatttctgttagtaaaatcttgaaagttgccgtactatgtctctatgcgactggactcaggctaagggctactttcagatctcattttagcactctggaccattctcatctgaataacaacagtgaacttcattttagtatgatggcaaaagtctccttttctaaactctaaatcactgaaatagtaatgggaaataaaataacattcaccatctctttgaaagaggacaacagaatttgcctgggtgtatatgttagtctggtttcttcaagacccaagtaactgttcaatcaaaaactcaatcaattaacaaaatcatggacaagctctggaaaacctgtaacagaggataaaggaagtctttagaacctaaattgaaggagaagtaccataagctttctccagaactttaatacctttgaattaattaattaattttttttttttttgagacagagtctggctctattgcctaggctggagtgcagtggcaccatctcggcaacctctgcctcctgggttcaagcgattctcctgtctcagcctctggagtagctgggattacatgcatgcaccaccacacccggctaatttttgtatttttattagagacggggtttcaccttgttggccaggctggtctcgaactcctgacctaaggtgatctgcctgcctcagcctcccaaagtgctgggattacaggtgtgagccactgcacccagcctgaataattttttcttaagtgacagtctatcagagttttagaaaaattcaaattctgggcaggagcatacaacacattactatgcaaaaggtgaaaattaaacatttacaaactacctctagaaagcattttcgtgaaagtttaaagtgtatgttgaagagaagaaatattgatatgaaaaactccagtgagccacaaaactacttgagtctcttaactccataatcattttcaaccaccaccacccagatggaaaaacacaagcctaaacgaatgtaatgcttcccctctcctgcttcccaggcaattcatgccttcacactgatgacttcaggtagcgatcatttaaaagtaaatgtataatgacttgttatgtgactctctcccagcaccaggaaacatggatctctgtgtgtttgattacaggtcaaattctccattcagggagcaattaaaagttgctataacttttaagtcattgaaatgagaaagaaaatccaagaaatgaaatttgcttgatgattctattgcctttatctaacactgattttcacatgaaaagtattgctttcaaaagtcctaattagaaggccacccttaatagctgcatctacaagacatcagcaatacatagtaaaagaattaagcagaatatgggaactttgatattggtgtcttaatggggaaacagctttcaatcaagtagccctgtctgtattctatgttgaaaaggagtttttaaaccaaaactacatggattatgctcaatggactctatcgataatttacaactcttctatttactatgttccttttaatcataagctaaatttcttaatggaaagaaaatattaaatggtaacaatatggagatatttgtctttggtagaacctctctttacagcctatgaaaggggaaaatcggatactaccaacaccaactttaatctgatatatttctagtcactttggtttctgaaatcagtctgtgcagaaatctttttcatacaatgtcacgtatttaatcttggtagtaaaacagcattactagttagaaggaatacataaagtgagtttaattattcttttactttccatgaattaataatagaagcattatttttctcattgcatttgtaatgagtgaagactgacaaccctttctgaacacaaattccagtaactcagaattatgatgagacttgaagaattttaaacatttcctacatttaagaagaactcggtggctcacgcctgtaaccccagcactttgggaggccaaggcttgtggatcacgaggtcaggagatcaagaccatcctggctaacacggtgaaaccccgtctctactaaaaatacaaaaaattagccgggcgcggtggcgggcacctgtagtcccagctactcaggaggctgaggcaggagagtggcgtgaacccgggaggcggagcttgcagtgagccgagatcccaccactgcactccagcctgggtgacagagcgatactccgtctcaaaaaaaaaaaaaaaaaaaaagagaagagctgctctttcaaaactactgccactgttgaagaaattcaagattgtcataaatgctcgtgtaggttttaaggaaaaagttatctgagaaatataataaatcatctgggtttttcatttgttttaccaaacagttataattttcctcttgttacagtgaactttttattgcccagaatccaattggtaaaagctctttattaaccaaaacttatttgtactacctcccctgacactatcgtaaaaatgttatagcacaatatttaatagcaaccctaaaatgaaaatgatgacttagaagattctggattattttctgaaacatcaagaaatcaatttactcatagataatctgcctcagttagagtaagtctcagttgactaagatttgagaaaacagaatacccaaatctcaatcgtgcaaacagaatttactctgtatatgactgatacctaaagagtgggaggaacgttcacagaattttagaaaaggtatctaaaaccaaatgagaagataacaatataattaacagtctttgcgttgtatttattggtttagataattataaattgttccattgcctaaatgaaattaggagacttaaaagctaaaacttagagaagagatccagagaatgaatccaatcccctcatactgcagatgggaaaccaaagcccagaagttaagtgatattgggtttggaccaatatccaagtccaagtttccattcaatgtattttccataacagaacgcttttaaaaaatagataaaatataggctaaaattggagttggggaagcacaaataggggtgagcagggatggaggctaccagcatttgaagagcctgttactaggtgtcaagcattgttatcgatacttttattattatttatttatttactatgattattattattattttttgagatggagtctcgctctgtcacctacgctggagtgcagtggcgtaattttggctcactgcaagctccgcctcccgggttcacgccattctcctgcctcagcctcctgagtagctgagtagctgggactgcaggcacccaccaccatgcccagctaatttttttgtgtttttagtagagacagggtttcaccgtgttagccaggatggtctcgatctcctgacctcgtgatccacacgtctgggcctcccaaagtgctgggattacagtgtgagccactgctcctggtctatttttaattttttttttattgtactttaagtcctgggatacatgtgcagaatgtgcaggtttgttaacataggtatacatgtgccatggtggtttgctgcacccatcaacccgtcatctacattaggtatttctcctaatgctatccctcccctagcccctgacacccggtcatgtgatgttcccctccctgtgtctcattgttcaacccccacgtatgaacgagaacatgcagagtttggttttctgttccagtgtcagtttgctgagaatgatggtttccagcttcatccatgtgcctgcaaaggacatgagctcatccttttttacagctgcatagtattccacgatgtatatgtaccacattttctttatccagtctatcattgatgggcatttgggttggttccaagtctttgctattgtaaacagtgctgcaataaacatacgtgtgcatgtgtctttatagtaggatgatttataatcctttgggtatatacccagtaatggaattgctggatcaaatattatttctgattctagatccttgaggaattgccacactgtattccacaattgttgaactaatttatactcctaccaacagtgtaaaagcattcctatttatccataccctttccagcatctgttgtttcctgactttttaatgactgccattctaactggcatgagatggtatctcattgtggttttgatttgcatttctccaatgaccagtgatgatgagctttttttcatatgtttgttggccacataaacgtcttcttttaagaagtgtctgttcatatccttcacccacttcttgatgaggttgtttgtttttttcttgtaaatttgtttaagttctttgtagattctggatattagccctttgtcagatgaatagattgcaaaaattttctcccattctgtaggttgcctgttcactctgatggtagtttcttttgctgtgcagaagctctttattttaattagatcccatttgtcaattttggttttgttgccatttggtgtttagtcatgaagtctttgctcatgcctatgccctgaatggtattgcctaggttttcttctagggtttttatggttttaggccctacatttaagtctttaatccatcttgagtcaattttagtataaagtgtatggaaggagtctagtttcagttttccgcatatggctagtcagttttcccaacaccatttattaaatagggaatcctttgaatcttttcctcattgcttgtttttgtcaggtttgtcaaagatcagatggttgcagatgtgtggcattatttctggggcctctgttctgttccattggtctccatatctgttttggtatcagtaccatgctgttttggttactgtagccttgtagtagagtttgaagtcaggtagcatgatgcctccagctttgttgtttttgcttaggattgtcttggctatgtgggctcttttttggttccatatgaaatgtaaagtagctttttctaattctgtgaagaaatgcaatgatagcttgatggggatagcactgaatctataaattactttggacagtatggccattttcacaatattgattctttctatccatgtgcatgggatgtttttccatttttccatttgtttgtgtcctctcttatttccttgagcagtggtttgtagttcttcttgaagaggtccttcacatcccttgtaagttgtattcctaggtattttattctctttgtagcaattgtgaatgggagttcactcatgatttggctctttgtttgtctgttattggtatataggaatgcttgtgatttttgcacattgattttgtgtcctgagactgctgaagttgcttaacagcttaaagagatttgaggctgagatggtggggttttctaaatatacaatcatgttatctgcaaatagagataatttgacttcatctctttctatttgaatatgctttatgtctttctcttgcctggttattgacacttttatatgtttatcgcattatgcactgtgctcagtttagagatgaataaaccgaaactgtctcatgatgagaggtcatcacaaccccaaggtctatgcaatttctctatattgaccccagaaacagactgactacgtctctggtgattggttgactataaactggcttatttgctcacatactcattcaacaaacgtatactgagccttttctttgtgccataccccatcctggaagttgggtgtgcagtgagcaagaggcttaacccttgccctcagatagtcagtgggcacaggggccaactccactcttttctaccccacagtgtctctcagtcatcgccacggttgggaacccccacttcaaactactttggaaactctgataatgaccagatccttgagaaaaacaccagaaagcttaatatcaccgctttatatacgtcttcactaacgaaaggctattaatgcaaatggtttcaataacaattggcaaatatgtttttcacagtagttttccacagtatggaaacatcaaatttcagatttgtttcagaattaagtatattatgaaaattttacagtttcgttaaatctgtcaactcaaatatgctaaaatttgagtatggtgcaatgtaatttttaaagttaggtttattttagactctatgcaacaagatcaattagagaaaaggtgatcattgaccataggaattgtggtcctatgcattgaccataggggttgtgttgcatcgaactgttagcataatgcttgaagcaccaattctgagaatgtaaaccattcttatatcatagacagcatatatcctgtgaataacagagcactcaaaagaatgaataaacttggtatatggcttttccaggcattttataaatactcactgcaaacttacatatataactgggttttgtatttgaaaacagtactaatcattctttcaccaaccaggcatgtatatgtgcagataagaatgatgtatgtcggagaggcctgtctacactgcctagatgagatttgcccttgatttgcagccacagctgctaatggcaaaacatacagctattttcaaccactccacttagattcacattcttctccgctctggtgctttaaaaagcaccaggatgcttgcttgtctccactgcgtcctggcaggccattattctacagactgattttaatttgagcttaggcatgtcatcacaagtttgtgggagagtcatctaaaatcatcagaaacatgatgactgtgttcttgaagcacacatgcaggatgtcacgcaaaagattatagatcactttgaagagtcaacattgtctcccagagtgatgataaatcccgagaagatgtacacctccacataacaaagatcctccctggtattgtagagatgagacgtgacatgcatcgacactgtgtcccatgatagactgacaaagaagcatggtgatacctcaattgttcacaacttctgtgggtaaaacatactttgggcaaagttggcccaggtaggggaaaattcctgactcttcattgttttagtggctgctgagaaagctcaaccatttcttttgtaaagccttctgagacccatcaagaagaggtgatcccttcctcctttgcacctttactagcgctttgacatgttcttgtttttgtatcaatttacaatctcctcccttcctagactcttatctcttcgaaggaaagatctgtttctttgaattcctaacacatttcatagttcctgacataaaattttgggattaaatatgggtggatgaatgaatggatgaatggatagggagagaaaaacaagactcagtaggctactgaagttgtctggcctggggctgctgaactagaactaactcaccccatgctcccaccgttgagtcaacttggagagaaaaaatgagggaagtaatctcaagcagttattatatgacatctgtgctacttgataggagtcgctactgagaggagaagaagcttcctccattttaaccaaggttgttgcagatcaaccttcctcctggtatgaggagagaagagattattattctgtagagatccagtaaggtgggtaaatcgggatgatacagaaaagaatctttgaaatatgacacacatgggaaccaaccagaatttagccaattactaattagctgagaaatctgggacaagttacgtggtttcactgagtatctggctcttcatctacaaattaaattcataatatctgctttgcagcatgatcagaggagctctaaggagcatatgttcagtgcctggcacagagagatactcaataaatattttcatttaaaataaccatgtatatgcattaccttatttttagttgtataatgacattttatttcactaaatttgacattaatgttgttggaaattatcctcttggttaattctggtttttctgcagaaaaatagattcatttttctttcaatgaggtaagtctttagtgcctaccatcaggcaaaatggtgtatctagagggcctgtaatattcttaggaaaatgtcaaataaaatggggtgaccataagaaaggtccataccaggatgactgaatcacacagcatgcaaataagaaagcttgaaaggtaggaggaatagtcattcaaagacacatgctgttatggattgaatgtttgtgtccttccaaaatttatatgtcaaaatcctaaccctaaggtgatggtactggaagcgtggcctttgggaggtacctaggttatgaaagtggagccctcatgatggaattagtgcctttataaaaaggaacccagagagctcttttgctctctttccaaccgttgagaggacaaggagaagcaggcagtctatgacctggagaagtccctcatcagaacccaatcatgctggcaccctgacctgagttccatcctgtaggactgagggaaatgaatttctgttgtttataagtcacctggtctctggtgttttgttatagtggcacaaatggacacatgcatacatatgcatatggataagaaggagctcatggttgcttgggtttaaagaataatatttgagtactccactcatattaactttcaacaagtatagaaggtcaaatgtgaacccacaatgtctctgaattggttaccacgtcatgagttctagcactaggtccttaagatgttaacctttcctttcttcaaaacaaataaaattggtcataagaataaacaagtgacctaagagaagggtgcctgatgggtcactctgtatgatgcctaacacttcacaggctgttacagcaaccggctccaatatcctaaactcaactatttgactttgactctccccctctttcttgtccgttccttcaggtgaccatcccattagaagaagacagatgcagcagagaggccactaactgtccatgtcacaggatactcctcctacacccccctccctccctgaagtggtctgttctctacaatcatctcatcatccccatgttttaacttgttttcataatttttcagaaccctaatctcaatcacatatgagtattagtagatttcattatttaaatgatttaaaataaggtctggatgacagggtatgcttgtctgatttaggtagtctacttcatttaaagaagtacttagttgcctaaataagatttaaacatttggatttgggaatctcttttcacttgttcttttcttggtccataagaagagccagaaccacagcatgcctctctatttcagagctacattaaggtgagtttaaaaacaagttaacttgttgaatgccaggaagaaaaacaatatttgggaataaaatctgatggagataagatttggctattgaggaaattatcttcgaataagcaatcatatacaactcaattcttaattagttgaatcaagctattcttaagtgagaatcattaaataaaattttaaaattagttctcaaattattttttaacccgaagatgtatcaataataaatatattaaaatagcatgtacagcacgcagtttgataaaaattgattaggatggattatacagccctcccccaagtagttctgcactgaattctgaaggtaacaggaatgagtgggaaggagccatgaaaaaaatgcaaacttgttacaacagaaaactacacttgtgattccaaaaaagagtggtttgggtgatttccagtaattcttgggagaaaaagagcaggaactataatctcacaacataatgagttgggatacgagactgaagtataaagatgaaataacatacctttcaaaaacagaattcctcaaaaatctacaagctgagaagaaagcacctttgaaaatatttaaagtaaaaataacagtatacaaatgctataattatgggaccatactatagccatctagacagattaagaatacagaagttaccttgacaaccatttcagagattggatagaagggggtgagaagttatgagctatcccatcatgacccatcagtcataggtgctgaaagtcttaccatctgtattagtctgttctcacattgctataaagaaatgccagaaactgtgtagtttataaagaaaagagttttaattggctcacagttccacaggctgtacaggaagcatggctggggaggcctcagggagcttttacacatggcagaaggcaaaacagatgcaggtatcttcacatgcccggagcaggaggaagagagggagtggggaggtgctacacacttttaaacaaccacatctcagaagaactctagcattagaacagtaccaaaggggaaatctgctcccatgatccaaacacctcccaccaggccccacctccacactggggattacaaatcgacatgagatttgggcagggacacaaatccaaaccatttcactatctaagcacagagcttggttctatgactttcaagctaagtctgctcacaaggaaaatgccactatttcatttattttttaaattcagtaaacacctactgtgcacctactttgctccaggaagtgggaatgtcaaaacaagttttaaaagcccctggaggcggaacttgcagtgagcctagatggtgccactgtactccagtctgagagacagagtgagactctgttcccccccgccccctaaaacagcctctggaatttaaattaacatgacaaaataatgtggcaagtgcacaaatggaggtacataaaaaatggccctatgggagctgtgcaggatggagtccaccaacgaggctgcaggaacgacttcataaaagaaggaacagctgggttggaacctgaaagacagctcagccaggcatggaggtgtgagggaggagtgctccgcccacatggaagagcacatctaggaaacagagagaagcatggtgcaggcggaacctcttaaagatggggtatggtaaacgatgtggttgaagaggtcagcgtgttgaatttaggaaatgaaatgcaaataaaatgcttaaaggaaaatgtgacataatcagatttgaatcttaaaatgttcgcacccacttttgtgtagaagacacattggaagagagtaggactgggggttcttcatcatactgagttcattttcttttttttccccaaggttgttaatttagtagatcagagaaatccactcgataaaaatgtttttaagatttcatcgtagcacttgatgagctctcttgtcaacaagttctggaaatatttactggatgataatacaatcaagtaggttaatcaccaggctccaacctacttttccagtcctttctttcctcgttccctatacctcctcatgctcccatcattaaatttcttgttgatccctgtaaacaccttgggtgttccagcctcactgcctttgttcaaaatgttctctccacctggaatgacattctttcatcttctagctattgaaatcctattcattgttcaatgggccaccacactcacatgtatttttgtacttgccttatgatcctttctttattctaccttcattatagtcatttgagtaattatctaatactccctaccacaatttacctacgtgagtgtaggaatgttttcatattcctcagcataatgataatgatacttattataatcccaccttcaatgtctttagtgagtcttgccaggcactgtagaaagttgcactcctccttgtcttatgtacttctaagtggcagtttcatgtattcattagaaatgaaaaaaacatggcagtcatccagacccaggctagctcctagctgtaagatagtgttgcatgacctggggcaagttatttaacctttctaaagttaaattttctcatctgaaaacttgtagggttgttttggtgattgaagtagatgattgtttaaaaggcacttagcatagtgcttaacatacaataatgagactaaaattagtctctatgaaatcacgtctaaacccattacacagattctaggagacacaaaaatacatgtggactcctctaagggagctcacaatttagtggagaacaaaagctgtcaatgctctgggattttgataaatactcatactaaataaggaaaaatgtgaaaatggcaaattaatgctataaacatttcatattcatattgatattatggaaatactacatgaaagttaaactatttttaaatctggcacacttagattacccccatgtgatacattcatgttttactaaaaatattttaattacccataaacctttttttaatgatggggcaaaaaaaatcacccctggaatatatcagagaagaaaggaaagaaagatgttgagaattttgaaaagcattttgatgtcattttcaactatttttttcagccctttacttcctcctcttcaaataagccatacagaataaaggaaaaatctacagaatattggcaattgggatgaccgttggcctctaccttgcctagagaggaaagaaaggcccaaggaccttgagatttcatgtgcagcagcatctgatgggccggttaccttctttgccctgcacattttctctattcctctccccacagctctctgccctgagaggttgacctggatgagctgcacccacaagctcatttgtcctcaggtttccagttgagttccaccaatgggaggcaccatcaggagatgcagacttcaagaagagtgaagctgggatgtttacttccccaactcgctctaccgagctgcgtgtgagctggctgggtacttcggtgaagtttgcagctcccatcggcgcccttttctacatcagcctccgtagctgcccaactttcttttgccattgcagccagttgagtggcaaaactggccccctcaatattttactgttccttgttggcttcattttagcctgtccacacttttgtcaattaccttttctttaaactctcaatcacctatttgaacatgccaccggggatgctgctttgatcctgcctgacaaccttggtttctagtttaatattttctcctctcccctccgccccacactatgctgggttgaagcataaaggaaataaaagattgccttcatggaaatgggtcttatttctttatttaaaaattatattttattggagatatttgatagttaagaactgtaatctcagtctttttttgtgatgacattgcaattcctttgtagaacagtttagaaaaacattgaaatttttcctaggcgaattgctgatagaaccacatccctttccagctcttgtccttcctctgatgaaaatgaaaagaggttattctttgcgatattggagccacaaaacaaccagataaactcacaaataaaatccatcttaagaataaaccaggagtccacaagtgcagtatttcaactataacatagcatgaagaaagggcaggctgaaagaaaaaaagcccgtggggacgagttttctttacatgtcctacaatagtttttctttcataaaagtaatgaaagaaaaggtggggtggagtggcagtgaggagaagaatgggtgagaagataagacacgcatgccttgtgctgaagaaaagactatttgtacctagtacattgtagaaattgttcaagaacagctcagccatgtaaaaatatgaccctgtaatactgccaaggtcaatcagacccatagtgattgacttagaaagagctggccttacaggataccattgcacaaagcctacgagagtttatacgcctaattgctagcatttggaaggtatttttgaatcttgagaatttaattgtacaaaactacagtataaaactcatactttagtttttttcttggtggataagacttaaaagagataccataaaaatgtaaagtagatacacagtcactctttcacgttatgatattttcattattttattagcatttattcctgatatttttgttttaatatttctttggcgtggctttattttccaaatagaatttaagctgcataagaacagatatcatgctttttagtcaccgttttttgaataaactaaattttgactcataaataataatttgtagagagttgcctattaaatgtcaaatttatatacctcaaatatgaacaattacgatgttcatgagtaagagtaaagtgtatgctgagagtatgtttatttttatcttattcatacaaaagaataaagtaattctttttaaaagaaggggccctttatatattttgtattatacgttgaaaaaatacatgtatgtaaaaatttgcaagtccaaaaaagtaccgagttgtaatcaatttttccttccagggaatcaggttttggaggttttacattttttttagacttctgtattatttgattttttttacaaggaacaagcattacttgtttaacttagaaaaaactaaaatcattaacaaaatcttgtaacatagtggctttagagacaactattgaaccaagtttgaagatgtatttgtaataaatggtgatttgattttccttctctcactctttatatgttttttgttaccagagtaatgggacttctccccgatttcagctcctatccccaactcattccaacaatatattttgcaaccatctctttacccatgaccatataccctattaagatttttctacccggtactatttctaggctgagccaacttttaggttgtagaaaatagtaaagggaaaaggaataaggacgggataggatttaaaagaacaaagatatttgaggggaggacaggcgagggagaaagtgacagagccctaaaatgatctcttttgcagtctaccctcccccgaaatcagtgcacttaaatgtcttttttttatggtgatttgggcaatatttactagagccagaaataccagagtatcaagtattcctgtctgagctggcattttgcctactagtccatgaattctcccactgggtacatcctgaagccttcttggagattgcaggtcataaatgtgcatgattaattgcctatgttgaaacaaacaaacaaaaaagttaccagaacattcagactagaaggtgaagcaagatcctgttgggcgacagaagaaatctgtttgggagcctgacagtgatggctgaaggaagaagattgagctgactggagctgactaatacacatttctagtaggtggaataacaaaagggatacgactagaaaataggggtttgttacaaattgtgaaagacacctaataaattacaagggacacaggctatggggcagtgacttagataaaactagaagagcaaaatgtaaagcaatttttttgttttttaatttaatttaatttaatttaatttaatttaatttaatttaatttaattttttgagacagagtcttgcttagttgcccaggctggagtgcagtggcacaacctcggctcactgcaagctccgcctcccaggttcacgccattctcctgcctcagcctccccagcagctgggactacaggcgcccgccaccatgccctgctagttttttgtagagacggggtttcaccgtgttagccaggatggtctccatctcctgacctcgtgatccacccgcctcagcctcccaaagtgctgggattacaggcatgagccaccgcgcccggccaatgtaaagcaatttttaagacaagtccacaactttgtttctaagtaaaattaactaattgagatgggaacataggggcagtatgctgtcttccttatgtatagagatacccacagatgtctaccacctatgggtgagaacaaataattaatcattttccagttctggttaacaaactatattgcctcccttggaggtgtacagtatgtgcatacaaaaacctgcattaaatatgttacaaaaagtctgcccagaattgggcaaaagagagccccatggtgtcctcaattgaggccatatacttttgaagacctcacagttaacaaatgaaatatgagagaatatgatttaagatttctttgaatgcccaaatagtaaatgaaattatatgttctataaagtgctccacaaatcctggtacaaaagcagtcagtaactttttttcattttcagttaaccgctgtgggactatcttggtgcatgttgcactgctgtaacagaatatcagagacagtgtaatttacaaagcaaatagttttttcctcacagttctggagtttggaaagtccatgatggaggggttggaatctggtgagggaggagggcatcacgtgggtgaaggggagcaggagattgaactcacagcctgaagctttcttataattgacatgaatccattcatgagggtagagccctcatgacctaaacacctgtgattaggccctgcctcccaatagtgttgcactgaggattaagtttccagcccgtgctttttaggggacacgtccaaactatagcaaagacttacatgtcttcgtaactggaagtctagtatttttttcttcaggttccctgtctttcccttactcatcgattccctaccctctgcaggctcatccagtccaaagtaggccaattctggctaccagaaagtggaaggatatagaggcaaaacagtgctctgctgcagctgatgcctctcaaagattagtcctacacagttggaacagtgatgactggcccagaatgctgcagttatctcacttcttcagttctaaggttggccaaaggctgtccatgtttgaagtcctagcaattgctgttatacacaaacagtccattctaaactgcaagctactagtaagggaccggagtaaggtcctggacccccgtggtttttcctcctcagtgagctacctaagggagaagtaactgatcttgctgcctttacccacatctctcacatttaccttttgctcacctttctcagggacgcaatcctcagtgatttagtcaaggtgctatatccttttcaggaaggttcccaagtaattccatggttccattgtctctacctttctaaatcaggctactctctgtgactccaaagtgatttttcatcctggcctaagtcatgaactcctgggcatttttttccctaaagaaaagaaaaacacatcttcatttctgattggttactgttgggtacagcatccctggacatatgtagcttctgctttcaaaattataaacagtagctgctgggagcagtggctcactcctataatcccagcactttgggaaggtgagggcagattgcttgaggccaggagtttgagaccagcctggccagcagggaggaaaccccatctctactaaaaatacaaaaattagccaggcatgtggtgtgcgcctgtagtcccagctactcgggaagctgaggcatgagaattgcttgaaccggggaggcagaggttgcagtgagccaagactgaaccactgcactccagcctgggccgcagagtgagactctatctccaaaataaaaataaaaaaattataaatagctgtgacaaagtacaaaccattagctttagatgtcttaaaaccttaggatgacggttctctacaaagtagaactttgtactcatttgaatgtttttggatgtaaattacagaaatccagcaaaagcaaagcaaagcaaacaaacaaaaaagtagccaagtgtggtggctcatgcttgtaatgccagaacttggagaggccaaggcaggagaatcacttgagcccaggagtttgcaaccagccttgccagcatagtgagaccctgtctttaaaaaattttaaaaattagctgggtgtagtggtttgtgcctatagtcccaactacttgggaggctgaggcaggaggatagcttcagcctgggtggttgagactgcagtgagctatgattgatcacaacactgcactccagcctgggcagcagagcaagaccctatgttccaaaaaaaaaaaaaaaaaaagtggattttttagttcaattaactaaccgagaattccaagtctaagcgttcttgtcagggctcactctttctatgtcttagatccacatgactttgtttctttttaagaattgactgaagcttctcaccaggtgcattggcaggaaaggttgtcaaagctcataccctacagaacatgatccaaaagaaagagagaacagttttactcccagttccaatatatggaattgcatgagtgcaattgtctaattgtcactgctagggttgtgcatgtgctctgtaaaccatgtgaattagagaagggtattccacgattaatcaagccacacaatgtttccctattgggtagagacaagtcatgattggcactctcaccacaaccacgtagaaagaggagaaatattcccccagtggcaagagaaaagctatatttaaaaccagttttggaagagggcattgcattgggtctcctttaaactgctactggctgagtttatgaggttccactgagagacatagtccatccagtttgtatgtggcctttatcaggcatgcgggagagcacaaaagactcacaacaaacctttgacctcatgtccataggtttggactgggtttggagagttcacctgcagactagcttgataaaaagtgctgtcacagatgtaaattggaatgtcaggaatagctttattgacttttgtgccagagcataggatctgaaaagtcatttgttctgcaatcttttagaaagacaggggccatgcaatatgatcttcttctactgtgatattactggaaaaaggactggacatttgtgctggctccattttctgctgatatatagttgtgacccaggacaatttatttaacctctttggaacttggttttctaatgtattaagggaggtggttatgccagttgatctccaacatctttgatcattcagccctgaatttctaaggttttatttttttcattggttttcatctgacacataggctggaaaagatgagactatggtaagaggcaggtaaaagtcattgtactagacaacttgaaaaggatatctaaaagataataaaaagacaactggttatttttatttgttttaatttccctaaaaaagatatcaactccaattaccaatctttgtttttaaattttaaaaatcacttattttaaggaatatttaagaaggaacttgtagtgtccagtgaagcaacttcaaaaagaaattagaaaaagagacttgagataactagcaaaagcaatgagtagatcttgttttgaccctagcttgaacaaaacaattataaaatacatgttctgtacaagggagaacttaaatatgacttgcctatgatatggtactaaggaattatgattttcttagatgtgacaacaataatattgctattatggcaaattgtgggaaatagttattactttacagtgatgcatacttaaatatttagggttatatgtcatgatatctgtgattcactttcaaatacttgagcaaaataaaatatatataaatcgaatgcggcaaaatgtcagcaaaaaaaaaacctaggtgaaagttcaatggttatttcgtatactattctcaccgtgtttctgtaagcttgaaagtttccaaaaaaattaaagaaaactgattgtcctttaaagtttcaagctgtgcttaccttacatatttatttcaaatacagttctagtttttagttttcccaggtgaaactggacttaagtgtctttaagacagttaaaatatgatacctggattttcaacttcaggatgtgagttataaggtagtaaagggacagcctatttcctatgcaaaaatgaccttaaatagaatctttaatattcagtatgtccctccctgccctcaaccacgcacacacatagaaccttgactctttatagcttttgctaattgtgttaatgagcccagatgaggctgaataatgtagtggttagaaattctagctctgaaaccggttacctgggttgggatccttatgttaacaccttatgtttcagttttcccagctgtaaaatgggggaaaatgttatcacccatatgatgggggccttttgaggattagacatattatgcacttagcacagtttctggcacttcgtaattgttaattattatttatacattttgctgtggggaatccagataaggtttgagttgacgtcaatgttcagggacagaaatacttttgcttttcaggtgataaaattggttcaagagatgcattctgccctagtgactagtgctgagacagagatttttaaaaactggagggcagcatggcactgtggagtctctttgattgtagtaatttcccttaccaagtgacttaagtcaaagtcttctcagaatgctagaaaactaacatctggagaaaataaatttctcaagactctctaaaaataacatctccccaacaactacaggctggaattatatttgatagatgcttcattgtacttggcaggcatactaaagtgatgttgtggtggttattacaaaatttgctgcaatcatttataaccaagtaagactccttcattaggttacgtgtctattataagtgcttattgaaaacccaggatttggtttctttgtaacatgtaagtttcccgtttatctatgaccttttacatttaagtattgcccaagcacatgaaaaaaaggaatttgtttcaatggagatacacaaatatccttattcttcctggaccttattatgaaaattcaatgctactcaagtttctctaataaaactttagagaaactgccaaagacttgggttttattttgttgtcagtctttatttaataatggcatctgtattttacccaaagtaaatcttttccttcttagaaaggtaagcagcggatgacttctctattgaagactcctctttggggccctggtagccatttgccaggccaaatatgattcttcacacatcaaaagagccatttaaaataatttatgtaaatgaaattgttgcattgctagaatctgagtaaagaaatcctttggtgccttggagcaactgcaagaagctaacatcaaaatcagtccttcaaattcttttttcaaggagaaaccaggtaaaagagactatatgatttagacttgtgtgtgttattcctctgaattcaatttaaattggggaaatctggccttcgtggggagctgttggtatcctgttggaaatgaggtcatctctgttctgatcttccactctctgcaaaagaatctactgtagtggggcacaaaatagaagctgttcaggaaggctgagtgagggaagaagtggactctaggctccctttcatcccagaaagtcagtatctgtttggggtacaagtgacaggccttcaaatatgtgtcacatagccttgctaaggacgaaataaaggtctcagttccatctccaaaattgtcaacttggactttttaaaaatataaacagcactagattaagtgaatatatgcactggagcttcttggtaagtgaaaattattttgaaaatatgattagtaatttttttattttattatttattattttatttgccattttcaaatatcactatcactctttcctaaccatttttaagtttttaaccttctgcccaagttttaacattaagaacacccaagtcacaaaagtgtctctccagcactgtgctgactaggtggacactgatttacccacttctcaaatttttgggtatttacagctgcttgtaatatcatcattttgaaccatcgctccatacaatatctacatacttacaaacaaacagaaagaaacaatacctctaagcttacatactacaaaaaaaacagtattattagcagattataaatttttgctcttttcttaacttccttaggctcatttgttcttattgaatgttttactaattgtcgaccctctcccccaactctggccccagctggctactgaacaaatttgcaaacctgatgaaaatatgaaacagccttagttccaagttagcccttaagtgcagctatctgtccctgtaaggtcacgttctctcaagcatttggtgagcagtgtaagtgccctacaaggagtgcgactgcttgctacactctccagtggtgaagcaggcaaatttggacacagcagctgtctgctcctgaagacagctggaaataaccatgtgtgataggatcagctatgtgaggcagggtagcactgttgtctgtaaacagcatgctatctctgagactccaagacagtgacacaagcagcaccaggctcaacctgccctcagaatagcaggggaggcgctttacatccagccttgcataagttgaatccgaatcacaggattttaggactgaaaagtgccttggagaccatgtcacagccctctattttcacagattagaaaggaaacaaaaacaagaatctgagaccgcagaggtatagtgacttgtgatatttgtaattgtcattttgcatacatgcatagacccatcagggatccaagcagatgcatgtgtcattctgtcgtgcttaagctggttcatttgtttcctttcaaatggttaattatgcacatcaacaaaatttcataagatttagccttagatataagagtaaatattttgttctgccctcaattcaaatatgccctcaggagagcgacatcaacagtcatgcggttactgtatggcaggctttgtctggaaccaagcactgaaactacaaagacaaatgtcaggatgacttagaggcattcacagactagtctgggaaacagatatatgaacaaataattaagagatattacacaagtgtcatatgggagatttatgtaaagtgaaatattagcctatgaaaaagtcaccacctaggaaatagggagaaaattgagtaaggccacagcagaaaaccactgatttaagtcttctctatagtaacacttgaatcctggagaagggcgtgagaaagatgaaggagtcagtgcagagggaaaatttcaggcaagaaggaagagggttttatttattgtaaattgactttgaagagccaccattttttttctctgtctgattcttctactatctgctgtagctaaaatttgcataaagaaactgtgcgataagggtctcttttgaagccgtgtgcatggacttcatgattgcatttttccttcattcttacagactcttatattctggtttgtacttttgtttggcttgattgagattgtcagaaatatgattctaagacagataagaggcattctagattataagtgaccaaatgaggaatagctggtggtaattcttaaaccaggagggacgttgggagattggaaagtcataacaacaatccagggaagaaaagctttcactatgacctcagattgaaagtcaacaaagaaacaagacactcacgaaaaatacagcaggaagaaataaaggatgcagtttcaaagtgcaagtttattaggagtcaaagacaataagttgtcatcatttgcctacaaattgactgggctttaaaaaataagagggtaaaggaaaataggcacttctgttcattgctgatgggagtaaaacttggtagttttaaaattaccatcctggaaggtaatttttctccctcactctctaaatataagtatgtacatattacatatatgaagatattatataatatatgtaaataatacatgttataaatatatatatattttaccgtattccatttaaattttatacatccacagatcctcatcccaagaaggtaatatgtatgtgcctaggttatgatacaaaggtgttcatggcagagatgcttattaaacagaaaaaaaagaaagaaacctgaatatttgataatagaatacacatcacatgtattatatgtccataaaatggaatactatatagctattaaaaatactgttcttttaaaattcacaaagattaaaatagtagacataaagtacttagaacagtgcctggtacctaataagtgctcaatcagtgttaactttattattattattagcatattttaaaacatggggagatatttccatatgtaaagtaaaaaaagttacaaaatagtatataaattatgataccaattatgtgtgtatgtctatgtatatatatgcatgtgaacttaggaaaaagatggagggcatattagtttgctagggctgccataacagtaccctagtctcggtggcttaaataacataaatttattatttcaaaattctggaagctaagagtccaaaatcaagatgtagcaggctggattcctctgaggactgtgagcaacgatcccgttccaggcctctctccttgcttgcagacggctatcttctccctacatcttctcattttcttccctctctgggtatctatgtccaaattcctccccctcgcttttttttaataaggatttcagccatactggattagggccaactgtaaaaacttcactttaacttgactatctctgtaaagaccctatctccaaataaggtcacattctgaggtatgggggattaggacgtcaatatttgaattttgggagagatacaattaaatccataagagacagtatgtatatcagtaatttttgagttatggatggcatttattttattctttttccttatctgttatttttttgcaatggactcttggaactaatacaattttaaaaagttattttttgccaggcatggtggctcacgcctgtaatcccagcactttgggaggccgaggtgggcggatcacaaggtcaggagatcgagaccatcctggctaacacagtgaaaccccgtctctactaaaaatatttaaaaattagccaggcgtggtggcgggcgcctgtagtcccagctactcaggaggctgaggcaggagaatggcgtgaacccaggaggcggagcttgcagtgagccgagatcaccccactgcactccagcctgggcgacagagcgagactccgtctcaaaaaaaaaaaaaaagttattttttaattccatgcctcagaaagccagatacccttttaataacttgactaaaaatacttctaattccttccatatttctctattcatctttaatattacctcattttactgtttaagactaagcatagaacttagaacatttaacattccctgtagaaaggaaaagtttggatactgaaactctgaatattcagattatatatgcaatatgtattgcatgtgctttagaggtcaagattattttcttctggagtttctgtttcttcgtggattcctaaactgtgttaagataaagcagaatgattacatagcttacaagtattgtcattttggagggatgcttactttcctgccagtttctgagcttgtcaaatctaaagtcagtactgtacatttttcctgaatactacatcacttttaaataggaatcctgcatgttgaaaaatatgtatcagaggtaaaacatgttttatataatagatagacttttaagtaatcagtcattattatagaaatcagagtaaactgaaatgcgataggataacttttactttggtaacaaaaagaatgaacttgtaaagcaataaagtaacaattaatttgcatatcttttaaaacttcattactgaatttgactttcccgaagctaaggatgtgccttgcttttcattgtaaaatggctggaattaggatatgctacacaaagatgaaagtgtatgtaaggaaagcttatactcaaaaactgttttcaatctattatttgaaagtgctggtcatctgaccttatgcttcacagctcattcatgggtcgacgttcagtgaaatcaattcattgtctgcaattaacatacatcattctcatattattaggtggcttgtatggctaatgcttttccaactctaattattgatttggtttcataaaataaatcagatacaaaataccagcttctttactagtattcctggtgatgctaccgaattgcaaaaataaattactgaagaaggttttgtggctggcaccttagagggagagaagattgttactcattatgttaagtactgtcttatatcatcatgtaaataactttagtgattgcttggaaagaaaactattccaaagagaaaattaatatatctgatttgtttatttattcatctaatttagggctgaaagatttttggactgatacaagataagaaaatatgtcactaaaatttatcagtgcacacagcgagggaccttaccctataaatatagatttaaatagttgcatgcttggttttctctgataagttaaatcagataagatgtttaatatataattctccattgtatgttagaagaattctacccatctctctgtttctgtcagttgtaggttggatgggaaattaaaagttaattttgtctttgtccttttgtctttttcttatcagcagtgcctgggaggcatggtaaataaagtgtgctcaaagtgaccttcagttaactcatatcgtcttgacacaagtaagccaggctctacccttgtaatcttcattgtcagctacatgaagaggagcttctttcagtaggaagtgcgcatcatccaaaaatatataggtattttattcatttcatgtgattgtttaaaggagactgcaagagtagagaatcaatagagaaggcaatgcgtgaaggagaaaaaattacaggccaaactgctgccacgcagagggtgaagtaatttacccaaggttagtagcagaacttccatttagggacacagtcaaaattagaacccgtgggtcctagctttaggtgcagaatgccttcctcttctccatcctgcctgaggctgtggaaaggcaaacgagctgcccttctcatatggggttagatgactggttaggcactgcacagccacatgtctgcgtggcatgttgtttctttacctctgccctattcacatttctgtctctctctaccgaagtcagaagttgaaacttctagttgtaagggcacaaagtggctccatgtcaactttcccccgtaaattatttttatgggcataccaaccaagggcatatctcaaacgcatgattgcttttggcatcgtaccaatgcttctccccccacccctgttttatggataaaaaaggccttttctggttattcttctcagatggggcccttgaaacttctgtaatgcataatgttaataaatcaactagcaaaggaaaaaaaataagtcgcctgataaaagtaggcatttgagagttcaggctcctgaaatctatacccatttcttagttatatggaacacatgacttcaggctattcctgtatcccttttcactcctcagtaaaaagctgattttagatgagtgttctgattagaagttgctgcattaagaatgttagaactacaggtctcctgcatctacggccgaatagataggtggggctgctaatgacgttgagtgttccacgaagagtgatatgtaaagatcttcacttggatgtactgagtgaccactgtgtgttcagtaaccacagggcaggatatctgaattctgcaaaggacacagcgctgcagtgtgtgcccttgagagtctcctttacaaacacgccagagcagagatagtgacctcatgcttcccagagaacatcttcgctgggctgtcctgaggtcacctcacactcaacacacccaaaatagaaacacaatcctcctcacacttgtgtggggccacatcattcccccatttgctagaactagcaatcgcatttttatgccaatgacaaattggttctgtgtctgtacagtctcctatagctacaccttccatggctctcctgccaccactaccttgatgcaggcttgtcattacccttcactgccactcttgccatgactttcctgatgggctctgaaactgcagattctccctcgccagtccatcttctgtgctgctaatgggactgcttactaaaacacctgctcaggcccaccaccttacccaaaacctacaattgttccttgctgcctacagaataaattccaaaatggtaagccttggaggcaaagccctttcataacctgggccaagcattccttcttcaggcttatttgggaataaataattgctatggtctgaaggtctgtgtctcccccaaattcatatgttggaaaccctaatacccaatgtgatagtattaagaagtggtgcctttgggaagtgataaagtcacaagtactccacctttgttaatagaattactgcacttataagaggctccttggagctcccttgccctttctaccctgtgagcatgcagaaagaaggtaccatctttgaagcagagagcaagtcctcaccagataccgaatctgatggtgtctcgaccttggactccccagccttcagaacagtcagcaatacatttccattatttataaattacccagtctaaggttctttgttatagctgtctgaaatgatgaggttaataattaatgaaataaatcagtttcctccagatatactctatggtcttcagcctgtacctctcttctcatactatccccccagtttgaaccaccgttaaagggcctaccaaactgttgtattcttcctatggatacaaagcaggtgtcaacatttaggttgtcttgggccaatcgaagatgaaaacctagtattcacatctacaatcaagttgtataaacatgtaaaaatgagatactatatacatatgagagtaattggctagatatcaaccaggcaagactgccctaaattgtgatatattttgagaacagaatcaactgtaagtatgatccatgcctcattgcattacagggagaacctcaaaaaattatattactgcaacctgggatgagaggtaagggaggtggaaagtcggtagagatggtaaattggtggtgaactttattttacaattaacctacggggatgattattaaataatagtatgctttggtactcagaagtcaaaccattggataggacagtgagatttagagagaaaactaaaatttccatgctcttatcctttgtgttgtttcttccaaatatatttatcaaaacacattttaagaggggtgggaaacgccagttacacaagaaaagctatcctctgcccgactgaagaaattgttcaaacagagtgcattctttcataagcaatgcttcctaatgtagccagggtcagcaagggcttaggttattagttatgtaatccctcgttcctcaaactgcagttttgatttgaatacacagtttcaattagttacttcagtttttgtcttgcagcgtatttcatttttagaatcaagagaagctcagataatccctgagttcacaaataacacatctgacccccgagaggtacctttagcacagctttgagccctgtgctctttctgtgacaccacttatagattgaactgtgttccccaaaaaggtatgttgaaatcctagtccctgtaatccctggtatctgagaatatgatcttatctggaaatggggtctttgcagacataagatataagttaagattaggtcatactgcagttgggtgtgtccttaattcaatctaatgtatacccttcaaagaagaaaaaagacacagagaggaacacacatggagaactctgtgtgatgacacaggaaaactaagcaacaccacatactgatggccccaaccagaaactaggaggaggcaaggaaggatgctacccagggtctcagagggagcggggtactctcaacaatttgattttgaacttctagcctccagactgtgcaaaaatacacttctgttttaaattacctggtttgtggtactttgttacagcagccctagtaaacaaatacaccacgttacccgtttggattgcccatttttgtctttatcatgttctctcggggaatctctaaacaaaatgacttgagtatcatctgggtgccagatgctgtctttacacttggcgaagttgttgaggtcctggctctgcatactagttcttatgtccatctgctttgatctggaggtcattattatctacaatgtcacatcaaatcttctgtctacctagaggtttagttaagaggacttcaaattctggttccttgatgtagccacagccacagaatgtcataacagtacatgttggatgtacctctccaggttgctatgaatataatgacatgaaaatcattgtaaaattataatatcattggctaatatgtatttaatatgaattatgtgtctaggactgggcagatgctttacatatgttgtctcactcagcagtcacaaagggctctgaagtgggtgctattatcacctatgcccattttacagataataaaaactgaggcacaaagaagctaagtaacttgcctgggaccctatggcaagacagtgacacagttgggattgcaaagctacagtcaacaactccacagtccatggattcccacatgcctcgaaggcatgtgaccttaaactatctgtttacatcagaaactcgccataacccccaccacatttactctaagtccctgcaggatttagcttcaaactctttctcaacctcatctcttgtcatctccactttcctccctgcctcccgcccctatactttaatcatagcaggatcttcacattccctggaacgtgcagactctgtcatcccgctccgttttccacgttctgctctttgactccaggtgttcgtcccccatgccccaatgcacgttgtgcacatctcctgcccttatgacccggaggaaacgttatcttctctgagttccaaattccccaataggtagttgctcccttcttccttcccatggcacgttattgagacctgtactctgacaccgggtagggctgcagtaaagcaccaagttgcccggggcaccacagttatagaagcactcgttcttagagtcaaggggcagaataattcatggcgatattaacttgtattttctccttgcaagtatgatcttcggttgggctggggtagaggaaatatagaagagggagagggaggtgattacctccaggcagagaagaggatgaagctgaccgggagctttgggcagcaggactcaggcgggccctacttcttggcagagccctgcgaggaagcaaggccatagaaagggaatagctgcctgtgtatctgggaagatggccctgcgcaccagaatcccagatcctcaaggatccaatggtccacctgtgtcatggaagtagtggggtttccagacctcaagtaaccagccaggcacggaccacaggcacccagaaatagcccgtggggagccaaaactgaaggggatctcctccatgctctgggttgtgaaagaccttgagacctttgcatgagagagagacaaagccaggagaaaccctcaatactgacagattgcatttcccataagcccagcaggttgagagctcagagttgcattgaatctcctttaaagataaaatcaagacacgtgccatttactgcacacacacctccatttgtgagccatgattcatacccaaaacatgtgtttccatgtctgtctccactactggaccatgcacttttttagggcaaaaactgacattttttgtcttcacattctcaacctttgggaggcacctactgcaaagcgggccctgaacgaaagcctgctaaatggatgaagagaaaatgaaccagtcagccaggtagctgatcaatctctaagggttctgtagctcttggagtctatgaaagaaaaattaaaagtactagaccctccaattcaatctctatctgggaaggtaactaactaaggtcaagtcttcctcaccaaaacagccaaaaggaagaagaagggaagggagttgctaactcacaaaggcttctttattccttagcctttgattcaagaggatgagtaagtgaatttcttttcttttttatttgttgtagtgctggcttccttcaggcagtatgaaaaatcaaagaattaggctggtacctatatcagataacttgaccaaggactgttggaagtcaatgaaaagtgaccctttgggaaatgctgttaggaaaacagtgtttccctctctactgttttttataactactggaaactttgtgcttcactagctggttcttctaggtgtttatattctgaaaggccatgacccggataatttggttgagagaatttctgctcatgattgtgtagttacctggcttctgggcatcaaggataccaggacacacaaaaacactctatgatagcccagattcacaaggtttcatgcaatttcttttatgtgcaattgctgggtcccctccccagaagaaaatacaatgctgtaagggtcaaatacctggaaaatatcctaggtgacatttagaaaaaaaaatttttttcacgtaagttaataagtcagcagactgctctcctctctattctcaataccttgagagactggcctgtgtcagtgggaaaagacggcaatttgataaaagcagggtctatatcacaggagatctggcctccaaatattccattgtacaaataaacagaagaatttcaatcttctttccattcttagggctcctaagagatccccttccctctcctattcagggtggtttagctctaattaaattattttctcttgtacaaactaacaggctcgtcattagcttccagttagaaagatcctatcatcctcttaaccatctctataagagctggaatgccttgactttcccaagagaggagacagggagaacaggaacctccatcaccctagggctatttggcaatcttccctcttcttccttcaacacccctttttgaggttagagtcatcctattccttccttctaggttccactggagtcagagggattaggcaatggggcatggactgcaatgctccagccccacccaggggtcagggctcacagccaggttactcaaacagaggtcactgtggctctctcctgctgctcaacccaggctggagccgctagccacagatcttagacacacaccacgggcaaggacacaggggtctggctttattggctgtagggccagtttggctgggcgactaggtggacattctaatgactaagcacctttccttagccactcccagggtcagttaagagacatagattttaaaaccaagagaaacaaaacctagcaaacaagagagatccagagagaaaaatactgtaaaatttacagattagaatagacagttttacctgtacaagaatctgtttttgatttctgctaaaaatattgcatattcattatattaccaaaccaaatattaacctgaccatggctttcaataatggtgttaggataaacctgtaattcctatatcaaggaataaagtcaaatgaaattaaatataaatgaaaccagcatcttggaccttaaggtcttcctagatgtttagggttcactttagaatttcaagagtagcctatctccttatcctcctctcaatagagcctgctttatttccctcaagtgttagtaatcataatgcgatcctaatgtattagatttggttccctactttatttctaggcttttcagttttgtctagttgatcatattttttgttttgttttgtttttgtttttttagctaaaaatggcctgtggatctatcctgtgtgatatttgacataccctatttatatttaaatagatgctttgagaaatgtaaggtttcctttacaatattctaagtttgggcaaagttcaccattgcattagggttgaagtataactgattatctaacttccatcgcttcttcacttccttaaaattctttgattcagtatgtggggggagggcgagaagttgtttctgatcaaaacactttttctgaagaatattctttggtactgatatacttcgtcaatatgatttatagcaagatgtgcgctacaccagtattgtgttaaatgtgcttccagatgacctagcctctgatcattttattcttttttgatttttcaattgctcatataattcatttcaaacaaaaggaagaaagtgatcatagaaataggctaggtagcgggaaaggaagacagaaatgcttaacaagttgcaaacaggaaaaagaaattaggacaaacgggcttcagaaaagccgcaagcacgctggtaaacaaacttaggctgccctggagcaaccccctgtttgtctttgctttatggtgcaatgtagtctagtggtctgatcaactgggaatctcagttttgcctcagactccctgttctgtactgaatggccttggacagggatctctgatgtgagataggcaggttttcaaactgtgagggtcaatgtttataagtggaaatgttgcaaaggggtgaagggcattattacaactaaaggaagcactattatatagaaacaatcaaatcaaggatttttttttctgcacatttagagccaaacactcaattttcctgccctgacaatttgtttatttgttcgtgtttggattttattgaggtccctgataacacaggcattttggaaatgggtgggagtatgtgtgaatagcaaaagaaatcatctactggcaggtattgatagtttcttctgttttgtgcatcctctcttcctatccctagaactgatctctttttttaaataagaatatatattgtaatgtatattttagattttataataagcatgcttagttatttgcatttttctcaaaataatattatatgtacatattagtaatcaagatattcaaacacatctttagatgaaaccatgtttaaagaaagctctacttctattaaaatcctgcgatacttagagcagtgcagtttagccgagtttgctgatgagtgaaatccataaatagttaagagcctccagccatggtaaagaggaagtaaaatagactgatctcatgacctaaaaacaaaagctgcaaaataattaacattttacttagtatttaaacaaaatattgtagagtgagaatttggttatatctgaattggattttcatctcaatgttggagtccaacagacttggaactattatgctttcttttatttcaaagttcaggctttaataagaaaattgtttctattgttcattaaattatataatcacttaagaggaactgtatccaagtttttacctttaagccttatgtacaaattacaaaatgtaaaagttaattctttaaaatttatattctgtgtttagtagattattttttaatgttgagtactgttttccatttagaattcatagatctaaatagtaacaggccctgcttatctaggagtaaaggaagaaagaaacctattcttgcctccagcttaccccaaacatagagactgaagaaattaaatttattctaggctctgctgtacaaagcctagaaaaataatctagcccaatagtaattagtttccctttttcatctctcttctcttcgcctggcttcctttttgtctttttttctcctttttttttcctttttgttccaatatatttgggtacctactgtgtacccagcactgtgatgctgagtgccttggaattaaaaatgaaaaagatccagggtcagagagcagaccagaaagatggcaaatgagaaaccatctacatattccacaaggtactgagagagagcattagcaagacacagagatgaggttgaggcgagcggatcacctgaggttaggagttcaagaccagcctagccaatatggtgaaagcctgtctctactaaaaaatacaaaaaattagccaggtgtggtggcaggcacctgtaatcccagctacttgggaggctgaggcaggagaatcgtttgaacctgggagacagaggttgcagtgagctgagatcacgccatttgcactccagcctgggcaacagtactgaaactccgtctcgggaaaaaaaaaaaaaagagaaaagaaaaaaagacacatagatgcaacaggctgcaggacttaaggttttaaggagagcttcttggaggaattgagctttggaactagttggtactaaaagacaggtagcaactgaccgagtacatgaaaagaaataaggcaggggacagcatacacaaagcttagaaagaacatgcaagtcaatgtgtctatttcatttaggggcaggggggagatgagtgggagcaagagatgaagctggagtctgacatggggtaaaagccttccatgccatgctgtggaatttggatttatttccgtggggaataggagccacagaaggtgattagatagaagaatgacatgaccagatttgcattttagaaaaatcaccctggcatcttctataagtcttatggggttgaaattgagtgtttctgggagataccatgtcatacgaatgtgaatttctttaaacctgggcctatgcattcattcacgcagcaaacctttgttgagcacctatttaacacaaagcaccatactcagcactgtggtaaatacaaaatgggacaagatacagccaacagcaagattttcaacatcatacctaactactatctttttttaagtgtctaatgaaaacttatggtagcacagccatgcttattcatttacatattatctatagctgctttcctgctgcaatggcagagctgagcagttgtaacagatgtggtctgacctgcgaagccaaaaacatttgctctctgaactattaaagaattctctttttaagacaggcttgctactgtccaaacctcaccagtgaacccccatgcattgtctataatatccaattggtgtagagcttaattccaccattaaaaaattttctttggttttgaaatgcaagaactccaataagattagtagactctattcttccatttcttgaaataatattttccgtgtcaattacatctcccttgccattaacaattaacaaaaactgaaaaatagtagagagtaaaacttcagccttgtaagtctgcataattccctggtctagataaatgaatttctttcatgtctaagaacattcaaagtgctgagtttaatttaaaagaaaaataaagctggttgaacattctcactctaattctacttgtaggaaataaagaaggatagaaattagcacctatctcagtggagtgttttgagaaatcactgcgtgaaaagatggactgtgatctcaatcagaagccactgcaatgagattttggaaccaaatatagcccctagagaccaacttggctcttaagtagaaacaatcaatcctacatttaaatttctggggtttttattatagataaaagaaaatccaaataaccttcattcatgtcttacgccaatttctttagactttaggaattatggcacttgtctattatgcaacctcttctaagggaacttacacaaaaattccatttttcaaaacttaagaaaaccttttataataaaatagtttgaagaaaaacgaaaaactaattggaaactcactggaaataagaccactagctgaaccaaatgattcacatagaaacaacaatagaaagctaaatgcacaacttgtggcttgtatattaataatgcaagagccatatacatttattcataataatggactgaagataatttgctgtagaagaattgaaccataactaattgttgctctacacattttatgttagtgttataatctgacgttatgaagattttcatactaaaatttaatgtcaaaatttcattcagtattagtgtctgatttttatctatatgtacaatatacatatcatggatactataacaaatattgaacataaactctttttaggacaccttttaacttccttttttatctttgattaaagtacagacccaccattaacctaacaaatagttcaaatcattctggatctccaattattagtcgaggtttactctatgggagaaatagaattctgttaatttctttgaagaaatcatcaaaaataattatggagcctggagaatctataaaaataatatgaagaggaggttttcatctctagtgagtgcttcaaattgcttgaacattatttactctgcccaaccacaaggacagggaaccttcattgccttaaagcttcttcttcttttttttttattatactttaagttctagggtacatgttcacaatgtgcaggtttgttacatatgtatacatgtgccatgttgctgtgctgcacccattaacttgtcatttacatatggatgaagctggaaaccatcattctgagcaaactatcgcaaggacagaaaccaacactgcatgttctcactcataggtgggaactgaacaaagcttcttctatacaggaaagttggtgctacaaaacaaagagaatacaagaaaatgccaacaatgaaaacggaaatcaaggaaacagtaagaaacaaaaccaccggtgtttttcctggtatccagattcttgacctgagaacttgattatatcagttgcttaacttgggcctcagtttcttctcccttaaatgtagataacaatggttgcctgtacacttcactggtcattgtgagtaacaatgagaaacaatagaataaaggcataagtgcatctcaagttgtcaggtgctaaatctttgtaagggtggtgagtattattcttcctggatggagttctttctcctccactggtttattttcttagtttctgagaatgcatatatttgttaataactcacccagaatgttgaagtaaatatttttttagtcctttaatcatcagaggagacatgttagcctgattaaaatatctatccttgatatcaatctacttgcgtattagtctgttcccacagtcaaatgaaagtatggcccttttccgaattccagaagctcaaagcctttcatttcagcaaatctataaactagagaatttcttgtctacaaagtactagttcatggtttgtggtccttttgacacctgtgacattgactctctacaagatccttgagggcacagactttttgttaggacaagttttccaatatccacccagttgccactagagttgtgttaaaacagagtactgttgagatgccaccctacttaaaatctgtcactcaactcatcgaaactgattgtttcgatgcaattcaggaaacagatattttgggttatatcagggctaggctctgtgctaggtacaaagcaattcaacaaggacttagatatgataggagccctccaggagcccctcctgcttatgtgatgttactcaactccacgggatggcagctgggctttaaaaaatctttctctaacttaaaacacaaaccatgttaaaggcagttttcagaaaaatggaaaaatttaatatgagcctctattagatgatatctgaccatctaataaattatcattgattttatttgtgataatggcattgtgatatataagaaaatatccacctttttagagatacacatcaaaatcagaagatgtaaactaatagatgtctgcagtatactttaaaaaaaaattaagcgaaaaaaagaaaaaacaaaacaaaacaaaacaggttgatgaacaaatgggccaaaatttttttgagaccgtgtcttactgtgtcacccagaggctggaatgcgttggtgtgattatggctcacggcagccttgacccccccgggctcagacaatcctcctacctcagcctccagtgtagctggaaccacaggtacacaccaccatgcctgactttttttttttcatgtttcatagagaccaggtctcactgtgctgcctaggctggtctcagactcctgggctcaaccaatccacacacctcagccttccaaagtggcaggattacagatgtgagccaccatacctggcgccaaattttgataattgttaaatgtaagtaataggcctttgaggaatcattttattattctctttccttttgtgaattcttggaatctttcataataaacacatttaaagaattggtttcccaaacttctagacttttattcacttaggattagccttagcacccatagcagtgtgtccggaattggtgggttcttggtctcactgacttcaagaacgaagccgcggaccctcgcggtgagtattacagcccttaaggtggcgcgtctggagtttgtcccttctgatgttcagatgtgttcggagtttcctttttctggtgggttcgtggcctcgctggctcaggagtgaagctgcagaccttcgcagtgagtgttacagctcttaaggcagcgcgtctggagttgttcgttcctcccggtgggctcgtggtctcgccgggctcagaactgaagctgcagatcttcgcggtgagtgttacagctcataaatgcagcgtggacccaaagagtgagcaatagcaagatttattgcaaagagcgaaagaacaaagcttccacagtgtggaaggggacccgagcgggttgccaatgctggctcgggcagcctgcgtttattctcttatttggccccacccatatcctgctgattggtagagccgagtggcctgttttgtcggggcgctgattggtgcgtttacaatccctgagctagatacaaaggttctccacgtccccatcagattagttagatacagagtttggacacacaggttctccaaggccccaccagagcagctagatacagagtgtcgattggtgcactcacaaaccttgagctaaacacagggtgctgattggtgtgtttacaaaccctgagccagacacagagtgccgattggtgtatttacaaaccttgagctagacataaaggttctccacgtcctcaccagagcagctagatacagagtgtcgattggtgcactcacaaaccttgagctaaacacagggtgctgattggtgtgtttacaatccctgagctagatataaagactccccacatccccaccagactcaggagtccagctggcttcacctagtggatcccgcaccgggactgcaggtggagctgcctgccagtcctgcgccgtgcgctcgcattcctcagcccttgggtggtcgatgggactgggcgcagtggagtagggggtggtgctcctaggggaggctcgggccgcacaggagcccatggagtgggtgggaggctcaggcatggcgggctgcaggtcccgagccctgccccgcgggaaggcagccaaggcccagcgagaaatcgagcacagtgccggtgggccggcactgctgggggactcagtacaccctccgcagccactggcccgggtgctaagtcccccattgcccggggccagcagggcttgctggctgctccgagtgcggggcccaccaagcccacgcccacccggaactccagctggcccgcaagcgccgcacgcagccccggttcccgctcgtgcctctccctccacacctccctgcaagctgagggagtgggctccagccttggccagcccagaaaggggctcccacagtgcattgggggggtgggtggctgaagggctcctcaaatgccaccgaagtgggagcccaggcaggggaggtgccgagagcaagcgagggctctgaggactgccagcatgctgtcacctctcagcaggagctatgctcaagagttgtgtcctcccacagtttcctctcctgacttgcaatgtctccaggatcctatttaatgtagtctttgaaggcctcaacatcagctctgctgggaagtccttgcttaatcgctcaaataaaacagactttgcccatctttaagtactcagaagttggctaattcctctattatgacattagtatattttcttatataaaatattacttgtcttcttctcctgctgcagtggaaactttttaagattaggcaatgtggccggtagtggtggctcacgtctgtaatcccagcactttgggaggctgaggcgggtggatcacctgaggtcaggagttcaagaccagcctggccaagatggtgaaaccccgtctctactaaaaatacaaaaattagccgggcgtggtggcaggcacctgtaatcccagctactcaggaggctgaggcagagaattgcttgaacctggaaggcagaggttgcagtaagccgagatcgtgccactgcattccagcctggacgacagagcgagactccatctctaaaaaaaaaaaaaaacacaaaaaacaaaaaaaacaaaaacaaacaaacaaaaaagactgggcaatgtattattttcattgtctttctttcccctgacttttcacagggtctgacacagaatcataaaacccctgaaaatgtctgtgaaatcgtagagttatcacagtattcacagcacagagcacatagcaggaatgtcatttcgtgacctcaagaaggatagcgccacaagtatatttgggcagctaagctgtgaaaattttattttgattggaggaatacagaactatgcaaaacttgggtgtatttgtttaacttaacctagttactacagcagtttctcaaacttcctcattcatttaggggtttaggtatttgattgactggcgccagcaagaactcattttggagagcaccacatacataactaggtctcattcaggcacggtccacactattcctatccacaaagtgcttttgatttaccgggaaatcttttgacaaagctcttctcccttcagggaagtgtgggtggtggtggtggtgcaggacctagaagcaaaaaagggacacttctaacaaagccgtgaagttcttctgtgctgttataacgcgatctacctaggtaaagatttgctctctacatttgtttacagaaattgattccacaaatctttgtaaagaggagtgttttaggggcaaaacaaatgtgacactttctaagagcaaactctgtatacgaatttagacttagttaaaataactagttatcatgtgatctgatcttaactggctttttaaaagcagcaaaggaaatatattttgttagtttagcgtgcttgtcagaactgatcctgagacatggtttccttgggcacgtggcgtgtgttttgaaaaatcagcctcctttgggaattgtactcttaagatatttgttcagagatgttcaagctctcagttacaagatgcttgagccagaaacagaaaagtctgagtacagtgccattgttacattgtcatgtgcgtctgtgcgtgtgtatgtgtgtgtgtgtgtgtgtgtgtgtgagagagagagagagagagatagctatgataaaatatgaaagtgtcatcttcctcaagtaattctgaccatctgtcgtctcagctcatcttagggtcatagctgtgttgtttctcttagggctaagttgagagtataatattaaacaatatagaattgatagcaggccctttctttccccacctccccattgtccaactgtatgtacctgttcaaagaacaaaaaacactataaatgatagtatttgaccacagattatgatttccaaccttgcttgtttccttaggccacattgaaactgcatctttttttttgtccctttaacccaaaaagtaatgatggtggctgatggcacttggtaaggaattcaccttttatagagcaattatttaataagggtttaaaattattattattacaatcactaagcaaattacagtatataaaattttttccaggcaaaatccattagtcatgatcaaagattcctcagtactaaagactgtgcatgcataataaatatacttgggggtaaatttgctttaggggaaaaatgaagcctgtagttgctggatggaattatgcgtatttgagttaaagcactttagcgtcactatgagttgaagccaactgaatcttattgttacagataagtcccatttccttgaaaatataaactatgtatttgttatgggacttacttataggtgtgcagagtctaccataggttaatctttattgtacaaatcacttttgcttttatgggaagtgctgttgtgctgtactctacatggttatataaattatgcagtttaaggcacaattagcatgcattctctcagcttatgaataataacattcttttaataacaatatatttagacacacatagaatgaaaggagcttaatgtatcgttcaaggttctttcattgcacagaataaggatgaaatgctgtttaggaactcaatgaaaatgttacaaaatatcctcttaatctataatgtacacattgtgtatatgacatccttgggactatgcaatggaaatagtgacaagtaaacaatgaaacaaaaggaaatcaatttaccaaacccagaaaggtgaaagcatttggtgaaacacaactccacaaagaaatgtgaagtgctgacagaactgttacataaccttcaatttattttaataacactggaagggcagatgtcatagtggttcctggaaatctttttgaggtttccaggatgtgttcccattaattttttttaaagcacctactacattgtgcaacctataaccagcattgactaatttatatcatgttccctcttgaggctgactcaggtctagttctcctaaaagagaactgagcaggatgtaggagtcatatgcaaagaggcttctccatgcaggacagaacacagcctcaggaaggtcacaggggtcaagctgattacctcctccagctctggcaagcagagggctcagctgggttacccaagttcacaagagctattgacattcagctgtagctcccactcattatgggatcagcaggggactgtctgggcctcctgttaactcttctgtgccctgttttaagattgcagtgaggtcaaaaaggaagccatcaggtagctttgcctcaacttcttaatagttatgattcaagaaatgaatcttttaaaccagtgtctaataaaccttttacaagtggatgcctgcaaccaatcatttcaaaagctctggataaaacgcaagtaaatatgtttgttcatgatgcagtaaatgtttatttcctagactgaaatggaaatggggaggatatgttttctcttcccaccaagaataattcccactttgtctttaataaggaaggccacacatgatttttaaagagataatagcagcactattgtcacttaaaagtgcatgttttccctgagttgctcgtgtaaaactaacctcagagagaactttaacaactcatcatctaagaagtgaagtcacagttttacagaagttcagaagctctctattaggttacagacatggagctctaagtggtaagcctgttccttcaggctttgatctcctgctgacacattatgatcttctagaagtgacttaacctctttgcctctatgaactcatttgtaaatggagaataatagttaattaatccacgaagcatgtctctgtggtagcaatgggaagactgactctctgttacacccaagggcctctaagtcatctatctttcctagttcttccttttttagcgttatactggccctagaacacacattatgctgaatccttggttctcctcttttattcctaattgctcccgcaaatggttgagtatctgtacacagttggggttagttttcattcaactactatatttaaaaagtattaagcttcttttaagggccaagagcttgtaagacaaaagctgtaccctaaaggaggttagagtttagccagaagacatggaattataagcaatgtggtcaattccaggaatccacctaaataattcagagtccaggtggatttggggagttaggagttatctagtttgatttctggctttgtcagatgatctagctgactgccaaatctacacttgacccaaagacacaaaagactatctacatagactcgttcaatcttgactttaatcacaaatgcaaacagaaattccttgatctacctctttctgtaacatttgacactgttggccattctctctattatgagtgttctagaagctgtctcggtaaattgggcaatgctagctctgcatgattcttagctctccacctttctcttgccatactctttcacttgatgatttctatcgccctcgcccccaactcccactttatggatttagccatttcccaaatctttagcactaactcccagccctcttcgaagcaagaggtccatttttgtacttgcctgctctgcatttccactggtttatcccactggcatttttaactcgagtctatagtgacatctttccccagatgagctccgtcctccgacttcccttttgcgtgtgaggattcattatccacccagttaatcaggctctcaactccagagtcatctttgatttcctcctctgctttgacccacctaacttgtctcccatcaataacccatcaattctattttcaccctttcctttatttattttgtacacagccttcatcttcttaaggcaaaactgttaattttctcatttctccgtcataccctaatacatcacaggctaagttccaaaatattggatgtaccgtttaaacttctataacctggcatcaacttacattttgtcagccttctgattgatgatatattgtttcatattgctttacagccaccccaaaagttatacacccttcctgaatatgctgcatatgattctgcctccttgtgtctgcatttgccgtccctgcagtcaatatcctacagttcttcacaaactagttcagacatccatgaatccctcactgatttatcttacagtcagtcttctgatgtgtagcttttaagtcctacttttcctaaggaactcaacattgactatcagtgtcatgggcatttatggctttacctgacttctcagtgctctgaagatggagaggctgcgtcatgtgggtgtggatccctctgcatcactaagcacaattcttggcagagagtagagggttagtaatatatattgcaaaaccgatgtattagtcagggttctctagagggacagacctaataggatagttgtatatataaaggagactttattaaggagtactgactcacaagatcacaaggtgaagtcccacaataggctgtctgcaagctgatgagcaaggaaaccagtctgagtcccaaaacctcaataacagggaagcccacagtacagccttcagtctgtggtggaaggcctgagagcccctggtaaaccattggtgtaagtccaatagtccaaaagctgaagaacttcgagtcccatattcaagggcagaaagcaaccagcacaggagaaagacgtaggctggaagcctcaatcagtctagcccgtccacgtacctctgcctgcttttatcctagctgccctggcagctgattagatggtgcccacccagattgaggggtgggtcttcttctcccagttcacagactgaaatgttattctcctttggcaacaccctcaaagacacacccagaaacaatactttgcatccttcaatccaatcaggttgacactcaatatgaatcacaaccaacataaatgaaatcaaataaaggataccttttttctgaataggctgaaatatttaaaattttagaacatcaaaactttaatgaaattcattttagtttattatttcttctattacaatttcctcaaaacgagagagaaaattcagattattttttgacatgtaaaggacaacagacggctactaaatgaggattaaaatttaaatatgaagagttaacgacatcaagagtgaaaatcccactggattgcaaatagaatggaaaaaccaaatagtgtcatcaaaccattccattagactttcagttaataactggcagtaacaaagttctcctcaggaaaattaacagtgatatttaagcagggccatttctgtgatcagagctatgtaaaaaatcaagagaagaaaatgagatttaaaaaaagtagttcctggaaaacatggataatttattatcattttattgtgagacaattaacaaattaaattatagaagtcaaatcctaaaagagaaatacgttttatagcattttttttctttgtttttttgagatggagtcttgctcttgttacccaggctggagtgcaatggcacggtctcggctcactgcaacctccacctcccgggttccagcaattctcctgcgtcagcctcccgagtagctaggattacaggcacccgccaccatacctggctaatttttttttaatttttagtagagatggggtttcaccatgttggccaggctggtcttgaactcctaacctgaagtgatttgcctgcctcagcctcccaaagtgctgggattacaggtatgagccaccatgcctggcccatttaatatctttaaatataaaaataaagactagtttctgtgacttgttatagaagatattgagaagaatgtaaagttgttcaagatgatgcaaaactaccttttaaaaaagggaaaagtgaaaatatggtaatattgctattgtgaaaactactgtagaagtaaccactacatagatttgcatttttcatatctaaaaaaagaaaagaagaaaattgaattttgtctgattgctgcctttaacatccagggttgagtctgtcactactacatggatagaaatgcgtctgtttttttctccaatattcttgttagaaaatcgtgggattcctaatgggtattttccctcctctggcagatcactttttattattgcttctatttagaaatgaagaactggtagagatgggcatacaggtgtaagattgtggcacaaatcctgaatgccataatttgtgatttccccacaatctcactgatccactgcttgcagtgtctggttatggtttctctcctggaatctgacccatgcttttactcaacagaggtcacctcaaaggaggctggtctgtctgccccctagttttccagatgctaatcatgctgccattaaaattgtgcttcaaggtaactttaattcattactttccgcattgcttttagtcatgtcggttcagataagcgcaccattgtgctatgtcttggaaatctggcatcaccaattcttcccacatcttcatctcagtgcagccgaggtgcaataagcatttcttgctttaatgctggtatgtcaggtacttaacattgaatcacctgtgagcaatctgtgttttaaggagctttcctggtgattttagatatgctaaggtttgagaaccactggtttaggtaattaataaaaactgatgtaacagacaaatctcaatagcctaatacgacaaagtcttctttcttgcttgcatcaccatctaacatgggtcagataggctccctctatcttgtagttaagataacttgttttcttttcctatggagaaaattactttagtaattataaaagtagtacatgcttattataaaaaatttgaaagacatgaagttgtaaataataaaataaaatcacctatgatttcaatgtttagattaataatgtctattaatatcttggtgcctttgctttcttctctcgaacacttggctttcaagttgctaaggaagggaaacaaatccaagggattgtttgggaagaggttatggggcaggctcgggaatggcttacatcctttctgctagaattcagtaacatcagtgacatcactgcaccatactgcaaggaaggctgggaaatgtagagcatcacatggttatttttgagagttaatatctgccacaaacaggatcagagaaacattaggttacttccaccaggcagacaggttgttttgatttttcattttattattattatttatttatttatttttaacttttttgagttttgctcttgtcgcccaggctggagtacagtggcacaatctcactcactgcgacatctgcctcccaggttcacacaattcttgtgtctcagcctcctgagtagctgggactacagacatgctccactacggctggctaatttttgttttttgggtattcttagtacagatggggtttcaccatgttggccaggctggtctcaaactcctgacctcaagtgatccccccacctcagcctcccaaagtgctgggattacaggcatgagccactgcaccccgcttcgatttatatttttatagcatccatggacccttggtgctgaatcatcttgaaagccttcttcctgctcatatttgactgactagcatagggtctctatttgtctttgagattttttctgaatctatttgtgtccaggctagggccacacaagacacagacatagacatacatacacagctatgcatgtataaatataaaaataaaagggctagctcaagatgttctgaagtgtagaaattatactgaagggtagtatcactcaagctatcctcttcccactcttgattacattcccccagaggtaccaactttgaaccacatgtaaagctggtatttaactccgtaactctcaatgaagtcataaattccaatctcgtagaggctgggcaggtaatgtaagcagagaaagcagagtaggagatacatagctatgagattgaggatttatggtcaatggaatagcatagtctccacccaaaggaaacggtatgctagctctggccaattgctcccatgtatgaaggcaacctcagtgttgctagatttttctttcaattatttttctttaggaaaactagaaatctagatgttttggttaagtttcttaatttttttttacaaccattgcctaagaaataaaagacaaatgaaaaggatctcttttgcagaattggcctgtacatgcaagccctgtgctaaaccacacactcacacatctattatatatgtgtgtgtgtgtgtgtgtgtgtgtgtgtgtgtgtgtgtgtgtttgagacagggtctcactctgtcatccaggctgaagtgcagtggtacaatcatggctcactgcagcctcaatctgctgggttcatgtgatcttcacatctcagcctcctgagtagctgagactacagatgtgtaccaccatgcccagttaatatttcaaatttatattatgtagagacagggtcttactatgttgccctggctggtctcaaactcttgggatcaagtgatccttccgtctcagcctcccaaagtgctgggattacaggcatgagacactgtgccagcccacacctctatttggcatttaacaacttaaaattgcttaacaatttaaaccccagaatttacaacttaaaataccttatttttccatatagaaattgatgaatttgctgacctatactctctccttatttctactttatttttcccactgaattttttattaatcatattattattactattattattattttgagatggagtctcgctctgtcgcccaggctggagtgcaatggtgtgatctcggctcactgcaacctctgcctcccgggttcaagcaattctcctgcctcagcctgccaagcagctaggactacaggtgcacgccaccacacccagctaatttttgtatttttagtggagaccgggtttcgccatgttggccagggtggtctcgatctcctgacctcatgatctgcccgccttggcctcccaaagtgctgggattacaggtgtgagccactgagcccggccattaatcatattattattattaaacgttattttttgtttatcaaagttgacattaactccttatgtccatttttaggataagaaaattagcactcctccacatttttctcctccttctgctccatacctttatggatctattaggtatggcattatttgaacttgattaagtttacactctttaaatttcagactaacacggctaattaaatatttaataatttacattctaaaattcagaaccaataaatattttcaatattacagttacagtaatttagaatcatcatggagctgagtggaatgatgtaatgctacttcactaaccttggtccacttgacaaacgatgttctaagagtgaaggtcaagtgggcctttttctttacactccacaagtagctcaaaacattccacactgcagtctttgtcagatttggtccgtggcttcctgatacaggattttgctcttctttgagtttccagttttcttttttaatttccctattgacagaagaagcttaagccttttattcagtgccacaataatcccgtcttttaactctactatatgtcaaagttaatccatttcttctagagaacattgtagttagtatcctctatactcatgttccagttttgaccatttttttttttctcacatgccccaggtcctactttggaaagattacttttttttttttgaaatggagtcttgctcttttgcccaggctggagtggagtggcgcgatcttggctcactgcaacctctgcctccctggttcaagcgattctcctgcctcagtctcctgagtagcagggcttacaggtgcctaccaacatacgtgcctaatttttgtatttttagtagagacagggtttcaccatgttgaccaggctggtcttgaactcctgacctcaggcaatctgcccacctcggcctcccaaagtgctgggattacaggcgtgagccaccgcgcctggcctgggaggatttcttttcattgtacttctgggttggtgcactatgtcttagatcccatggcttctctttttttcttgaataataaacacaattcctttttttaaattttattattttttcattttattttatttatttatttatttttcttagcaaaggtaagtgtggataacccattgtgtgtttgaaaatgtcgttattttacattcacatttttctttgtcctcaggctgagaactcaaaaggatgtgtctagttctagctctgttttttatttatttatttatttttatttttttgagatagggtctcactttgtcgcccaggtttgagtgcagtggtgcaatctcagctcactgcagccttgacctcctgagctcaagtgatcttcccacctcagcctcccaagcaactgggactacagttgtgcaccaccacgcctggctacttttttgtgtgttttttgtagagatgggtttttccatgttgcctaggctggtctcgaactccttttctcaagctatctgccagactcagcctcccaaagtgctgggattataggcatgagccactttgtctggcaggatgtgtctagttcttcttaatgcctagacatggatctttcatcctgtactccagttagcatttggacatttctttggctctggagaatttggtcctctttcttctctgctacctccattttctttagctttatttttcttccttctattttgttctcttctctttttcagaaattcctcttagttaggggtattgggcctcctgatctgagtctccatgtttgttcattcttctttcacacatatatatgtaatatattttaatcttgggggctttgactctatgttctaaattaaaatttcttgacttatatcaagtactttagttaattttaagaaatttgccagttacatatttaatttccaaaagctctcatttttgaattgccctatttccatagtagtctctccttgagtgtgggtatgttttgtgggcaacatactcctgaatctttctgaagagactaattataattctggctagtgaattatttattttctctgggatcatttgttctgtttgtttattttggttcttttttgaccctgaccctctgatttttctcaagtgagtgtggttggttgtccacttaatattatgaatgagactcaattaatgaatataagtagcaaggataggttttctgtgctagaaaattatgtgtataaagaagagcagatatattttatagtgtgcaagagtggggtaaacaggcaggccttcttcttctctttttacctgtaaaactctagctcaagcttgtccaaccaggccacacgtggccccagacggctttgaatgcagccaaacacaaattcataaactttcttaaaaacattctgagattctttctacaactttttttaaagctcaccagctatggttagtgttaatgtattttatgtgtggcccaaaacaattcttcttcttccaatatgactcagggagccaaaagattgaacacccctgctctagcctctgagttctcattgagatggagttgagaattaactccagtccttctacttggccagccctgtgattatttaactctttatttgctgaaaacacctgctttctcagtacattaacttttctgggcagcaggcaagatgaacccatcaggcgattgcactatagcttcaggacctggaaaccctaccttgtcctttagtccctctagtcccaggagtggtagaaccttactgctaatggtaacctctgcatttgaatcaccaacttcagctattggcagtagccagttgcttacatctttaggataataaaccctttgtagtgatttatttcagtttggaatatctataaagacatttgttttcctgattaaaccctgactgacacagttttatagcccattcctgttctctaatctgctcgttctcaggttggagtttctacagatcttcaccagcagaaggggtcctttctgaattgctgcatctttcaatgaatattctgttagggctatggcttcctccaccctgaacatacatttcatgtcttcccatctttttactttttcttcttatgcccctgcctattacctccttttacaatgctgttataatttattcccttttaaacatgcttactgtcacttcaatggcaggacaggaggaagagatggatgtgtgcactcagtttattgcctagctcgaaagtagtgagctactttcaaggggtagtttttttttttaagaaaactggatatgacaatctgagaataatttcatttttactaatttatttacattaaaaacaagattcaaaaataataaaataaaaaaccccaacaacaacaaggttcaatgtaatgattatttctgttgttaaaggctggaggattatttttgaactaggaaaaactaagaaaaaattggggtgaatgatttctgtcctaccccttcatccatggggtaggacagaagctatgtccttagatcagaggctcttcctatgtggcatttctgtgtattggagctgcctctcttgaggttacgtggtttaatctgttattctgtgaacacaccaaaactattcaatttgctaatttggtcctgtagtgatttgagtatgtccctttcatttagccactctgttatgacacaaacatgattataatatattaagaaaaaacatttcttcggcagattttctttagttctagttacattgaactgagaacgtcaatctatctgggaaagtggagaaaattacataatgaccaaataaggtgttgattcaatcatccctaatgattttatagtggctgaaaaatagtggtctaagttttcaggattgaatctactacagactcattcagaaattgactctgctcaatattgcatattttaagtacctaataaaatggtaacttataaattttttaaatatgttttttgtataagaacaattttggaaaagaacatgtatggaatataaaattatttaagtatctgctcaattgacactcacctcctttctatgagaaattcacccctgaatgtctccatttgttcctttatttatttattttgttgcaagacctttgccactttgactactattgattggtccaagatggacacttgaccactctgagtcagtcaaattctctctcaaagaaccgatactcagagtcatctagtttctaaaaatggctggagatgagcaacatgtaaaatgtctgtggatgctggacaagccacccatcatccattatttggaaagaggcagagaaatgacaatgaagaatgacagaaacaagagaagagaaacaaagagacaagaaatcatgggggtggaggggagggggagagagagactgcaagcctgctctgggttcctaacagcttttattactgattccagtttctttagaggcattggatttgtgaggttcacctgaattcttataatgaaatctttcttttgcttaagctgagttgagctgttctgctacttgaaaccaaaagagcctaaaataaaacagagcacacagcagaacagggagattgttactctccatgtgcatgaatacagaaattcagagactgctgggtttacatctgtgtaaagagaacaaattgactgcaattctaggttggcctccagttattttttttctttatcgatacataagaaatacatcttcaacaatttgcatattaagtcttcagcaagtatccaattcctgaatatttagatgtactgtatttggttaaagcctcataaatttatgctatattttatgtaatcttaggcagttttgaaaaatctctttcaataatgctgaatgagctttgtagaatgtagcacaatatctggtaaatgtgtaagtgctcattactgttgatagtagcaaagacatggaatcaagctacatgcccatccatggtagactggatatagaaaatgtggtacatatacaccatggaatactatgcagccataaaaagaatgagaacatgttctttgcagcaacatatatggagctagagggcattatccttagtgaactaacacaggaacagaaaaccgaataccacatattctcacttacgggcacctagacattgagtacatatgggcacaaagaagggaacgacagacaccaggggtcaacttgagggtggaacgagagaagagggtgaggactgacaaactccctgttgagtactatgctgattacctgggtggcaaaatattctatacaccaaacccccatgacacacaattcacctacatgacaaacctgcacgtgtagctgtgatcctaaaagttaaaaaatagtgtaagtgctcattaaatggttagctcatgttctctttccttcttaaagtagtaggtttttcattgattgattgcttcatttgttcagaaaatatttgaataccaagacccatatctagttctggggctatggaggttttagttagacctacagctagaactacagaggaggtagatacagacaaatatattcaatactacttgctaaagactgcaatggagagaagatcagaaatttataggagcacagaggaggagcagctgcttggctgtgagggcaatgatgtcaaatttgccagttctgcctttaagcaagtcctttaggttctatggccctcaacttattatatgtaaaataaggctaataaggattttatcctcagtttttgtcacagttaaaggtggtaataaaaaggtatagacatatatacatatatttttatatggagggaaatgattggctcatgggggaagtttcccccatgctgttctcatgatagcgagttatcatgagatctaatggttttataaatggaagtttcccctgccctcttctcttttgcctgccgccatgtacgacgtgcttgcttccccttcaacttctgccatgattgtaagtttcctgaggccttctagccatgctttctgttaattcactaattcactaatactgcctggagaagtcaaaaaacaaacaaacaaaaaaacaaacaaacacacaactaagaggcagcatttgaactgggttatgcagcatttagttagtgctatgggtttttgtagggaaaaatgttctagaaagagcaaacagcatacacaagagcatctgttttatagtaacataaattcataggaacacagagaagaagaaactacttggttgtgaaggcaatggataaagtgtcttcactttatctgcagtaggaagagctttgacagcccactgcaggcagtgttagaaaggagtggttgaagaagcaggttggggctgcagaggaggacgattctccttaaccctcacacagactctggaattgtgtgaaaataaactgacaaagacagtgatatggtttggctctgtgtccccacccaaatcgcatctggaattgtaatccccatgtgttgagggagggaaatgactggatcatgggggccgtttcccccatgctgttcccatcgtagtgacttatcatgagatctgatggttttataaatgacagtttcccctgctgtcttctctcttgcctgctgccgtgtaagaaatgcttgcttccccttcaccttcctaaaagattgtaagtttcctgaggcctcctagccaggcttcctgttaagtctgtggatgtgtgagtcaattaaacctctttcctctataattacccaatctcagataatattctttatagcagtgtgaaaacaaactaatatagacagattaacagaagaaaaatattcaaatatttttagtataaggtttctgtgaaataggagccttcataaggaagtgaagacccagaaaaacatttagagttgtatattttgcaaggtttgatgaagaagtgaattgttgtggagaagtatgatgggacaaatcagggtatgatgtgatggtaatatgctggggagaacttagcaaagtctatttgttcagatccttctttgtgtccctgtgtcttcagagatgagaacattcctttcctcagggaataggatgggcacctctcacatgacggtctcatgatggctttagaggaaggtcagaaaatcctttctaggttttgtggcttgttttaggggagaagggtataaaaacatcacagagaaaccttcctgcttctgcagttttctcagattattttgggttaaaatactcagtatgtcaagacgacatattctggggcagccttgatagggctcagatgggaagggccatctctggaaatgggattttattctacaggtattaagaggaaaacagaggttttcttttaattaatttttttattatactttaagttctagggtacatgtgcacaacgtgcagctttgttacatatgtatacatgtcccatgttggtgtgctgcaacctttaactttgattgaggcactattcgcaatagcaaagacttggaaaacagaggttttaaacagaggcacaacaatcaaatatgcatttaggaagataacttgactactggtggagaaaacactggaaggaaaaagggaagaagagcagtttagaattctcttaagataataaggcatctataccctctgtttgtttcttagggatcattaattctctcaagactcaaaaggctaataatgattgctgtggaaaaatactactttcccaaaagtgcctatggatttacagatcatcctgaagacagaagcagaaatatgtgggctacaatatgaagtaaggaaataaatcttaagtatttttgattttttcagaaaaataaaaagtactaaaaagtaatgtgacttattgaatgcagctatttacagctggttgaatggacttattgatcattgcttgatggagcccagggcttaaagttatgtagccaatttgagcaacctattttatgactacaactgtttgtatccccaaatttccttctttttttttttttttgttttgttttgagacagggtctcactctctctcccaggctgtagtgcagtggtgtgacctcagctcaccgcaacctccgcctcctgggctcaagtgattcttctgcctcagcctcccaagtagcggaaccacaggtgcctgccaccacaccaggttaatttttgtatttttaataaattttagtcatgtgctttacttgggtgatagttataacttcatgagcgacgtgtctagtctcagaatgtaccacagttaaagaaaaactcagaaactaaaaacctatttcaaaataataagaatgctttactctttctgtttttagaataccacaaagagaactcagacccacagcattcattaccttttaattccctttctgctcttgttttgcacaaagcaattgtatccatgcttcttacttccaaaactcccttagagctccttcctctgacccagtctgaactctgtttttccccacttcctaccattttcctactgaacttgcatgacagaggttcagaagaacctatcgggtaaaggaggattcccatcagatggtaggggatgggaagaaactagggtaacactggcaggatcctctttagcaataaaagtgaggaggatgactgggaccatgagccattggaccatggagcaccaagtgtgagaaagggtgaccctagagaagagggacaaggtgaagtatggaaaaagttggcatacataagtgtggtctttggtctgataaactatgtcccactctagtttttatatcgagttaatggcagtaaagagagggtctgagctatccattagattgcactgcattggaaaggctatgattttatttttcttaagtccttagaaagtggagatacaaagaagaccaaattataaatgaagtaatcataaaataacagctaatatatttactgagtgcttattaagggccaggtattttttaaacattatcttatttaatcctcacacatagctctgaggtatatacatctccactttttagataagggaactgggctttagaaagtttaaataatggccaggtgctgtggctcatgcctgtaatcccagcactttgggaggccaagtaggccagatcacctgagttcaggagttcgagaccagcctggccaacatggcgaaaacccatctccactaaaagtacaaaaattagccaggcgtggtggcgggcaattgtaatcccagctactcaggagcctgaggcaggagaatcgcttgaacccaagaggcgaaggttgcagtgagcagagagagcgctgaagtttaaataacatgctcaaattggtagagcgagaatctgagcctagcatttttagtccagagtccataacttaataattggactgagaatttactgtaaacttatccttccatattaagtcccagaaataatagatagaagagtgaaagactttacaaaacacattaattaaagttattgtgttactgcaagatactttctctgaattattggcatttataaaaatgagactaaaattttcatgaatgtgaaaattggctaatcttagaaggaaagcgctttactaatggctaacagaattaactagcaataataacgtctatggaagaaaatgactttaaatactgtttttcaaatgaggaagcatctgttgaacatcaactgtaccctgcattttggaggtcatacaagacgtgtaagattttgaacttcaatactaaatgattgcttaggatagtgtatataaagtctctaacatattccattgcttacaacacgtcagttaatattgttttttttttttttccttattctctgtaatgagcttaagatccggttggggaaacgtgactaacacatctgaaatatacataaactagtgaaatataattagtatatgatgtagtttggatatttgtccctgcccaaatctcttgttgaaatgcaatccccagtgttggaggtggggcctggtaggaggtgtttggatcatgcgggtggatccctcattaatgacttaggccacctccttggtgatacgtgagcttgctgtgtgagttcacaggagatctggccatttcaaggtggcacccctcccatctcttgcttctactttggccgtgtgatgtgcctactcccgctttgtctttcagcatgattataagcttcctgatgcgtccccagaagccgagcagatgctagccccaagattcctgtaaagcctgcagaaccatgagccaattaaacctcttttctttataaattacccagtctcaagaatttatttatataaatgcaatgcaataatggcctaatacagtgcagtataagatacatgcaacatatttataattatgtcccactctagttttcatattgggttaatggcagtaagagagggtctgagctaactattacattgcattggaaaagctatgattttatttttcttaagtccttagaaagtgcagatacaaagaagtggagatactatatatatatatatatatatatatatatatatatatatatttgagacagggtctcactctgttgcaatcatggctccctgcagcttcaacctcctgggcccaaacaatcctcctgcctcagccttcccaagtagctggaattatgggcatgcaccactgcactgggctaacatatatatatatatacacacatatatgtatatgtatatggtagagtcaagagttcttgcaaagttgcccaaactttaaccccagggctgaaacaaccctcctgcctcagcctcccaaagggctgggattacaggcgtgagccaacgtgcccagccacatgcaatattttaaatagaagtgaatagttaggttagatttccaaaaggaatgggtattttacaggttgttaagatttgcttaggtgaagagtcaggaatttattttaggaagatgaaataatttgaatgtatacaagattaaatatgagtttaggggaatatttaatgtattgatacaattgagttagactctttaaaactgaaaaaaaaattcataaacttccagcaaaatgataagattttaaatcttttgactaatttgggttaagcagtataatcatgatgaatgtcttggtagcatattatcccaagtgaattaagcattatgactggtgacatctgaccccaggagcttttgagacaaaacaaggggacatatcaaatgtctggttttactccaaaaaaacttcagagtctggctaaaggcaagtattttaaacatgtttcttaggataacagcccaggttttaggactcttccaagtcatttggagaagagactgttaaattagaaacatcagctttaggtctatctgatcaggtattaatttgtccttacaaatgaaggtttttctccttgtggtgaaaatatcaagttaatcatctcatgcaactctcagtactcaatatattacccttaaagtcacatacacattagaatgtacagtgaagcagtgattaatgaaatatcatttcctaatagggcaaaaattgtgtctggagatacacatttttgcttttgtctttgttttttacagtcttggcatatcttgtgtatttttaagggaataattttataaaatgaaagtctaaatcttgggagtgactttttattttagaggagaaaattggatcttgctcaagctgagatatattggcattagtcctgctgtggtatatcttgaaaagacaacagaaatacaactcgactattatactgccattctgtttatgcaaacttgcaatattctgcatgctgcctggtacattccagagacaggaggagccaaacaaaacactttaataacattagctcatatgaattcattttttatacagtgcacatggaatgaaatgtataatcttatcagaattaattgaaatcacatgccaaaaatggaaatacggttcattgtctttaatttggccaagtgccatttaataccaaaaacatttcacacaacttcattatttatatagtgtatctagtgggcatcaaatgggataatatatattaaaaaagctaaaaaccatcctaaaatgtaaggttttcataataatagctccctttgactcagtgtattttaaaaggaaaatgtggtatttgtgtagtactttgtattgtgaacttccatttggttatttcatcaatgagtgattctaaactgtctttgtgaaatctattgatatgctaatgctactgcaacttgcaatatataaaatgacataaaatcaaatatgtttaacattagaatattttttctccaaataattctgaaagaaaggtagaggaaacttaaaacttaagacaaaactgattttaaataaattttatgaatgtttaaagataatattgtaaggtaattaattcctcattttggtctctgcaaatatttgaaatacaatgctaggaaattgttggcacttggatcctaatgtcatcacttttcagatccaatttctaacaaatataatcattgctaagcacaatatggggaaaatggcactggtgggttaggtcatgactatatgcaacaaacaatacaattaacatgttggtacttagatgaagaaaagtacacttttcttgctctgaaatatatccaattcttactaagacaactgaatttaaaattgtgtttccaaacacaatttgggttcaccagattccatggtgctgtttctttaaccctggaagataagcctatttatcatcttgctatacctcaccatgggttcttccaattccacactctgccttgcagtcttactggcagtattctgacacttattatgcagttctgggcaccctaaccttagtgacctgacctcttggtgaggggacttttgactttgcatcccaatctttcaggataaccataaggcacttcacaattgaattctgatacctgcccatttacaactaccagggaaaagtcacttgggagtccaggtgggggagtagtttgatcaattaataacactccagctgcatcattttccaacaggaagagcaactctattggtcaacatctgactattcaaaattctccacttacaagaatatctcctgtccttaaattcaaggacttagttaaagcagtaagcaaacccagcaggaagtcctctttgaagtgcaggagctcagatatgcaaaagtcttgatcagcacatgcttgaaaagtgcttactcttctcccctttgggattggccattaactcaattctggacattctcaaataaagctgtttttcaggttgcttcaacttcagagtcaataagtgagtggctttcgtcaacaagggttaataaacactttcctctgcctcccgcctcctcacattccaaagtggactcatttagcatgaatacattagcatttgtaagggacagccttacagttatctacatggagttcctgggattactgcagtctttcttatttattctccctgccttcaaatctcttcctgcttcaaaagatcctacatataactgcatgaaaaatcttcaacagtcacctcattctatgacttgagagcttccccaggggtccatgtcccatcttattgactctgctcaacatctcccaccgttctctctcaacatcccattattttgacacctctttcaacatgcttcagtgttatttgtctactcctggtgtcattatttctgctgtgtatattttttgcctctgctataagttgcatttgcattacaatttttaaattttaaaattgccttcctccagaaattctgctgtggtttacctacctctgactcatcccctttctattcattatatcctccacataaatatatgaaattttaccctattatctttaagctgttctttaacaataggacaatattaataactaccattttccaagtcttactgcattccttcacatattattttttatcatagcaacaatcttctgaggtagatattatatttattttatagaagagaaactgaagcttaaggaagttaagtaagtttattaaggtcacccacatagggattaccagggctgggatgtgaacccagatttggaacatcatacataattactctactgtgcttctggctactcaagacactaacctttactaaacacctagtagatatcggattccacagctaagtgatggagacaataagagcatagtctctgcctgtcccccggtttctcacagcctggtggaagaaaggatgtggatgtcatgagagcaatgtgataaatgttcaaacatgtggaactgcacgggtaaataagggtgacttatgagaggaagcgacagctgaatttgaagtgggaagaaggagcttgccagataacaaggagagaggaagtggccttctaggtgcagggaagtaccaaaacaaaggtgtaggagcaggaagggtctttaaacgttaggttaggtaagggctcttcacccagagtggccagaatgcaggactcggatttagagtggttggaggaggattcagaggccctggagacttatagcccgaagggctcgtatgaagactaagggggtaggactttatcttctgacatgtagttggctctgtaacatatttcctctgaattactttccctcctgattaaatcataaaggctttgaggacatctaagctcttcttattcccacctggatactcttccatatagaaagggagtcatctgtttattggaggcattggatgatctgctgtttttcttggttgagacttggtaccaccaagaagcagtcagtgccctcattttgggaagtattagatgcctcctgaagatgtggagtcctcatcccaaaagaagttagatagctatttttcaagtagtgtgatacttgtggaatctgtattaaaaatcctgataaggagcaaaaagagaaagaggcccaacagtagctttaaaatagagaatgatcctagagaagataaaacagaaagatccagaaggggacaggtgcgtcataatcaacatgcatcagttttgcgttggtgaagggcagtatttttattatcgttaaaatgagatcacttttttgcactaggccagtgtgaaaagaaagacttcaggaaggtgatgtaagtttaaaagtgaggggaaaatcagaaaaaaaaaaaaagaaaagaaaatccaggagttatatcagtaattctgtgaaagacagcataacatgggtgtgttcctgcagctgtaatagagatattatccttcttgctaatgaaaagaatgggtggtcttaaagatatttataaccatgcagtttgaagctcatgctgttttaagtgtgagaagagatttcttggggctctgttttgtagggaattattaaaataacctgggaaaatgaaattgcagcactccagaatgtaccctggccatctaccaccttacatggaatgagggtgtctttggcctagagggctctattgtagaaaatgtgacaactgtcctcttctagagtttcaaaacagtgctatttagtgatccaaccttggcaggtcaaaaaggagagaatcaatgtcctaattccaagttcatccatctagaatgcggcttaaaataatacagagaaataaaatagctgtgtagaattcttttaacagcaaaatcctatgccaaggtttaaaattcaataaatgaagtgatggaaagcaaatgtttaaaaaatgcgatatggttgactattaagtttccaggacaggctgcttgagttcagatacctgttctgcagctcactagcagtgtgaccttggggacttgatcaaaatctggcctctgtttcttcatctgtaaaagaaggataaacatggcatctgcctcacagcattgtgaaaattaaatgtgttactgtgcattaagcacttgggacagtgttggcacacagcaagtcctcactaaatgttaacgttacctttttttgagtccgtaaatctctttcaagagtataaagatttgtaaaagagatgcatttgaatttgtaatataattgtttttaaaatgattaagatgataggttgaacacatgaatgtatttaatacttttaacaactctatctattggtaccagagatttgaatttctccctctctctctctttctgtctctctcattctatgtattcttttttcccttcttaaccctagttcacactgtagcatgtataggagggtaggagggtaggagggaactggccactacactatgagaatttaatacacacatgtacacacaacttaaaacttttctcaatacatatcaccctcctcatcacccatactttctctgcacatactgaatcagaaaaactgggggtaccaaggtacctccacttataacctactgcctagattttcatacacattaaagtttatggataaatgtccaagattcttaagtaaggtttaactaatactgagtaaccaaagttttatatgccttactttataatacctatttggcacctaaacatgttgactctgaatttcaattctttcattaaattaattttttctcttcataaattggacgcttttggtggcaggtagaacacacatgtcaaaatgagccatcacacatatttatgggtatcgtctttaagacccttcctctaccaatctcatcagggtttaggcaataatgttaatctaaggatatggtcattttactcttaaaaaccaaaagaaaatgttttcttttataccacggaagtggatccctgtgctgagtgtaatttctatgactctgatttttgcctctgggtcatcttttcttgaaatgctcccaagatgaatatttgcctgcaaggtcatcctccgacatgtcgtccagtttgaatctcagcactctaaaacagggccctttccacaaaagccttcaacttcagaaagagctgccttttatgtggctcatgaatatggtctaactgcttcaagctctcctctctgacctttgtcctatttagtggagttcaattgtctcccacatttatttaagctaatgatagaagcattaagcaaaagttgaaaaaagggacaaatggattcatcatgaaaatgcactgcgccataaaaaagcccatacaccaagatgctattcacagtgagtagtaaatttatgaaactcattgcctcaaggtattatatgggctattatatataaataggttcaagaaggactatagcaggttattaaacaaaattgggatgccagaggtggaagtggcgagctcatcccttacctttgcgaacatcgtggagctgggcgacattgcttagtgcctcagtcagagagttgcttgactggagtgtattactttcctgtagcctgctggaacaaattgccacagacttggtggcttaaaacaacagaaatttattctctcacagttctgaaggcctgaagtctgaaaccaaaatgttgacagggcacattccctccaggggctctaagaaagaatccctttctggactcttccagcttctggtgcctaccccagtattctaatctctgcctctgtctttacatcatcttctctatgtgcctgtcttgtgaggatatgtgattatatttagggcccagttgaataatccagggtaagctcctcctctaagttctctaacttactcatgtcttttgccatgcaaggtagtattcactttcaccattcacggttgtattcacagagtccagggattaggacctggacatatcttttggggggccaccattcaacccacgatagggagggatcatccttctaagcattctatggtttgttttgttcctcattcttctttataattggagggttacttcagtctaaactttcattccaataacaataccacaaactttaactttctgttaaaaaaaaaaacctttctgtttctctccatttcctacattagtaatgagcattagttctgctggatgttaatagtggttaaatgaatacaagagaagccacatgtttcagaatcctgtttaaaacaacatttaatagaatttctcagaggcttgctatgccagtgatctttgtgatgttctgagaagacaatatggtgtgctcaccagactctttcaaccacacaccctctagctagtattccctagcatacattttgggaaactatgctctaaaacataagaatgacataaatcaaacatctctacttttttccttttgggaccaaatctaagcctatggccctccttgttgcatttgtagctaataatttcctcacaattatttgaattaatacagcaaaaaggaggctagttgttctttgacttagcacgttccctctggaatcaagcagattcttttctgttgggttttacatgatagtcaatagctttccctagagccatccagctactataattgaaatatatacatagtctaagaaaaaccctatatgggagtctgtgattttgctggctcactctgggtagagtgccaatgagcacgtgtatgctcatcttgactgtttcaagtcaagctgccaagtttacattttttagagactgaacagctcttaaaaagaatgctatacctgttcccctaacatcttttttctcttggagttaggtaagagaagaagaatattattttaccaaataggttcatatatatatatatatatatatatatatatatatttttttttttttttttttttgaaatggtgtcttgccctgtcgcccaggctggagtgcagtgacgcaatctctgctcactgcaagctccgccttccgggttcacgccattctccttcctcagcctcccaagtagctgggactacaggtgccagccaccaagcccagctaattttttgtatttttaataaagacgaggtttcaccatgtttagccaggatgttctctacctcctgaccttgtgatccgcccctccttcgcctcccaaagtgctgggattacaggtgtaagccaccgcgtctggccaggttcttatatttttaagtctttgagttctcttttattttaaaatgtccccctccccatcccccacccagacaggatgtcactctgttgcccaggctggaatgcaatggtgtgatcatagcttgaactcttgagctcaagcgatcctcccacctcaatctctaggactgcaggtttatatcatcatgccctgctaactttttaataaaaaagtttgtagagacagggtctttctatagtgcctacgctggtctcaaacttctgggctcagtgatcctcccacctcagcctcccaaagtgctgggattacaggcatgagctaatgcatccagcctaaaatgttctttatgaatgcttttttatgttcttcatttggccatccaacaaatgctcattgaaatgttctaatgcaccaacctctgtggttgatttaggagggaagggtatgtggctctggatgagactctgtgtgccttaaaggcactctcagtggaggatgcatggcatgaaaaaaatgtatatactgtgaaacacaccccaatagtggtctgagaaatatgttacagcatgaagggaaaagaaatatgaactctctttgggaaactaacatttactctgggttgtgaagaatgaaaaaggttcattcgctgtgataaagtacaatctaggatggaaaccaaggcatacgtagggaagcagttatagatgggtatgttgtatctgaggaataatgagaagttcagagttactccccagaggtaaaagggatgtggtgctggaaggaggggaggttaaggtaggctgatttccaatagggaaggattctgattgccctggcaggaagcttagatggtattttgcaggaaattgggagccttggggagggttttgtattaatacaaagcagtgacaagatgagattttgattttagaaagacaattctggaagtcagggcacatggaagccctcaaatctactcttgttaacctagctagaatagtttcagtttaaaattattaaaaaaaaaaaagaaaagaatttgctagattactagtaaagaaacttagtaataatctatttaaaaggcgaacagactctaaacaaaggcagtggtatctgagatagaattcagggaaaggcggatgctgactcaaaggcttccatgtagtcagttgggtggatggtgaagataataaggaagagaggcaaggagtggagctgctttggggtgggtagagaagtactagattgtgaataggaaggaatataatctagtctttggtgacagagactatggattttccctcagcctccactccactccctttcagcgtgcctggatgtacgataccgcactatgatgcagtactgctaaaatctgcatttcccaggttcatttgcagctgcttgtcaaatgtatgcctctctgagatttggaagatggaagtgcacatcctgtggccaattccatgcttctgttgtttcagctgtttcccctggcaagcttgtctttaggggtgtttgtttcttctgcagtagctgtagtagagtttccaatgtccagtgtttagctttatagtgtggaaaggcagtgtgggaagcattcattttgctggcagaggttgtggacaaactggcatagtggttggggagctagcagcctcttgcttctccagcccccttatcgtggtaaaagcagtgtcttccacggaggctcactctagactgttgttttggaagttgttcctgggcactctgcttagggcttatgcccccagagcttccacaaatcttaaagcccccagatctacccttgttaacctagccagaatggtttccgtgatctgcagctgatccttaactaattcaccttcaaatgaaaaaattttataagaaaattaagtatcgattatggaggacatgaccttgtcttaaacaccttccggtacccagtgcctagaacagtggtttgcacttggtgtttaataaatttgttaggtttcattgaattaattgaactccctgaacaatttgtgcttctccaaatagtgccatagaatatatttggcaaactccctaactctgatagttgttttacatgataaattgccgatattgttagtatctaaaatgctttgatctgaaatttttttggaattttcagatccatgccatctggcttcactgactcatggaaatttaatgtcttaagtcgtagtcaccacctgttgtttctttttctgtatttatgctggtgaatcatatttgctttcaatgaaaagtaattctttagtaaaaattccacatttactctgtcagtaatgatcactgactgagtgatcagaggaacaattcagccttcactggttcttaaatactcctgttccccccactaagtatatgactgcactttgagttctttatctacaaccagacagggtcacactcaacccttagactattcttatagaagaatgattcatagattttacctgaattttgtttttataatccttcttgcattgtagtagcattcatgtctggtgttctatgccaatattgctattttttccatatattttatttcttatgaacatttgtaatcttaatactttccacggtatagtgcccccaaaagattccctacacactcctgtgcaagaggccaattagaggacacatgagaaggagacatagatccttctctagtacctatcaaaatatgttttgtagcaagcagcggaaactcaactcaagctggataaaagataagtagcctatgttggttgacaggactgagaagtactgagataggaaggcttcaggtgtagttcaaataaagttcttgttctatttctttgtgattttttggctctgcttcttttgcatattagcttcaccctaggcaggcttccctgtagttgcaggagagatatctacaaaaacgtaacagcttgtgatgtccattgcacaaaatttctaagccttgctctgattaggctaccctctgataagggggatgattacattgaaacatcctcttaagctacccaatgagggagatgttaatggatgtgaggatggaaaccatgttatctcttcttcctgtgatccagttttgttgtggtcagacctagaccccaggaagacaattgggcatgttctccactatccttaagggcagaccaactcttaatatatattgttgtatcatttttactgtatatacatttttctgtttcctctgttaacaatgacaagcttgaaggaaggtttcatcttgtttgtacttttattattgatgcacaccagctactactggagtcccctcactgtacatgtggagcctttctctacatgtcatgatgctttaaaaggttctgattatgtgatgatgctttaaaaggatcatcataaaatacatttagatgtattttacataaccctgacttggctcttgagacatattgagccagaactaggcaattagtcaatcagtaaacacatatgaagtactcctgtgtgtgtcaggcatttggtgcaggtcagagaacatggcaaggagtagtgtctcattaaaatatttcaaggcacatataaatggatgatgtcatctcccaggtctgtgtcccttctcctgtcactgttggaattctccttcctctcctgggttttcttcccaggttctcagtgctatcgtgtatattgccccatgtccgtgatcttctaccgctgtggcttgccagtgctaggagagctcctttttctgttcacgcaaccgtgattgagtgccgctgaggatcccacaatgactgaagcacacgattcgccttgggacttcacagtctagtgaaaggcttccacataaatagcaatgtgatgaatgccaggatagaaataagaatcagagatccaattcaagcactcagaacagggcagttaaggaagatttctcagagacagcgatgcctatgaatcttaaacaaaaacaaaagcaaaaatgggaaaatgtcagccaggtgaaatggcattgcatgcagagggagcagcgtggccagaggccatgtgagagaagctggctgctagggaagagtaagtccctctccacagctgggtcatttcatgcgtgtgaaaagttgctgggaacagcctcattttccatattctgattcaagcaatgtggctaccgtttttggtgacccttaaatcattagatgacaccaagatgaacagttttcttcatgaacataagaggaaactgtaaccagaaaaggcctgggagtatctttctgctcagcaggaaaaacaattctgtctcaagagccatccctgcagaaggggaagtgggttaaggcaactccttgcagagagtgacttgagaggatgagtaaaacatcttcccagtggggtctccctccctttctatctggccacaaattctcaatagttaactcactaactgacgaggtcaataaaagtgggacatcctcttctatagaaagcctcggtgatcatggtgatcacatagccctgtctgaagagtacattaactgagattagctcattatctttgtgatgaacttcagaagagtttccgttcagtggaaaaaagagcaggcagggttgggagaggagcagcgaggcctctaggaggagaaactcattgaaatggtgtcagtgctgctgtctctgtggggttggttggtgtactagttagggttctctagagggacatccaaagggtggatttataaataaaagggagtttattaaggagtactgactcacatgaccacaaagtcccacaataggccatctgcaagctgaggagaaaggaagccagtccgagtcccaaacctgaggaacttggagtccaatgttctagggcaggaagcgtccggcactggagaaagatgtagggtgggaagctaagtcagtttcatcttttcatgttcttctgcccacttttatttcagccactctggcagttaaatagattgtccccacccagattgacggtgggtctgcttttcccagtccactgactcaaatgttaatctcctttggcaacaccctcacagacacatccaggaacaatactttgcatccttcaatccaatcaagttgacacttaatattaaccatcacagttgggttctggggtcctgacttgtctttctccacttttagttctttgccttttgtgttggccaaatgatgctccacactgcccagtgatgttctagaacctgcaaatgtgttctttcacatggcaaaggggactttgcagagatttgaagttgaggatcttcagatggggagatgatcctggattctctgggtgagcccaatgtaatcacaggagttcttgtaagtgaaagaggaggtaggagagtcagaagaggaaatgtgatgacagaagcagggttgtgatgcagccaggactcaaggaatgtgggcagcctctagaggctggaaaaactcccttagaacctccaaagaggatacaattctgccaacaccttgactttagccccataagacccatttcagacttcttatctccagaactgtcatataataagcatatgtaccataaaccagtaagtttgtggcaatgtgctacagctgccatacacctctctttacctgatgcccatgacccgtgaggtcacccttcccgcacctaccaccatcctccacaccaagtctgtttggtgtatctaattctgttggctcattttggaattgtgtcaaggtcaaacccttagcagagtcacagtggagttcaagccacagctcagggaaaacagaggaaaggagggcctgcaccggtcaagtctgaggcctgaggtgcagctccaccagagtgtcagaacacagagcagcaccaaggagcagaaggaaccagctacgagcaggaatggaggaaccaggaagcggcattagacaggcatagccaggaatattttcaggcatgactgagagatgtgtgttttcgctgggttccacaacctgtggcatacagtgactcaggtataaagatatgacaaccctgaataccatcatgtcacaagagctttagataaatgctttcaatcaacagaaaatgcaaagaatcaagaaactttatgtccaccaaggatacttggagaaagtccctaagggacaagcttcagtccagtgattttagactctattctctgaacacaagagtattggtgaattatgttctcagctctcctcgctgttgtatgtgtgcactcactgcaagtaacttacatcattttatttgaatgtattttaaagcagtaggtagaatagcaaaggaatatgaaaaccatgaaatgaatggacattttatgtattcagagagaggagcacccaccactgccagaaataccatgtaaaaattggcaattcggagggtgcagtatttagtatagtaaataaataaatgaccaacattgtgtaaacatgaccaaaaagtgtattgtaatgaatcgaaaatcaacaaaattttattcactaatgaatatcaacaaaataagttcaactgatgggaataaaagatgagagctctcaagaaatgagagcttaaagaaacaacaattatattttcatatttacacttttatttcatttaaacagttgatgaaggctcacattgtacccaaaaatgtccattaaaattaaccttacaaactttatttcccatttgaaagtgacacagaactaacctctatgaaagattagctaacatggcttaaattattcccataaacactataaagaaggggtttctttggctttaaaaaaatttttgatttttaaaaaatcttgaaaggcatacaattatatttagtttttaaagaacattcatcttcataactcctcactaccaatttaagaagtagctcagggaaaacactattaccatgtttttcagatgggcctagagaagttaagtgacttgcttgaaggcaaaaaattgtaggataaatttaaattgtaacagatattattacctcattaaatcctcacagcatgagatgaagcaaatcaacagtatatatatatacttgttcattttaatattcaggaaatgaaagccaaattggtaaagcaacccggctagcaaaatgcagcaacatagaagattttatgactcattgcctttttcattcataagtacctaagatgtcaagatttttcttccctttaaagaaacagtttgtggctgggcgcggtggctttcgcctgtaatcccagcactttgggaggccgaggagggcggatcacaaggtcaagagttcgagaccagcctggccaacatagggaaacccaatctctactaaaaatacgaaaaattagccagatgtggtggcatgcacctgtaatcccagctgcttaggaggctgaggcaggagaattgcttgaacctgggaggcagaggttgcagtgagccaagatcctgccactgcactccagcccaggtgacagtgtgagactctatctcaaaaaaaaaaaaaaaaaaaagcagtttgtaagacatctcctccctttctatttttctgggactgaatcccaagtaaaatggctgccagaagatccagcaggggagtgctgctgcagcctttgctcagctgggaggccctcaatctccagggagacagattctgggataatgcctggaaaaaccttcttctgaatcaactgcagtgtcccttcttcaagcctggattcaaagtctctgcagatggcagcagttctgctcctgaattccttcagaacacagtcaagcaaggaggcaggtcagagaaaggcctgaggtgacctgcaggcctggggctttgtgtcaaaaatcaggagctggaagccgaagatcccattctgtgatagggatcattccttgggtttacacaggtcacattaacaaaaaataatccattcaggaaaccaagtgttcttcaggtcagcctactatatatccatgagagaaaatggatgtgtcctctagggctccacctcagcagtttccaaagtgcattccttggaacactagtcctctcaggtagcctatgaaagaaaatcctgtgataaaatgagttacaaaatgcttccactattacctcaccttggagattctaaaatgtacatgaacatgttaaacgctttgtttacacaaaatctctaccaagggcgggtttcattatggaaactttcctcccctataaaaccaaatataaatgtgggacactgcatgttaattcattgttaggacagtttccccctaaaactttgtagtgggactttagaagaaagatgatagagcataaagaaggaaaggcaagattcttgccattctaacgctgcctaagagtggaaatcataacacatcttcgggtattgcgttgtcaatctgtaataggtgtaatacctgccacaactcactgttttgaggatttgcagttataattaagctttactgaagcggtagaaaacaaaacaaaaacaatcaaaacctcctgagccacttagatggagagtgagacaagattatttttcagaaatgactttagcaaatggtgtctaatactttgcacatttaaaagatcacgttatagtagtattcatgttttcttcaaatcttaggtggagttcaagagttttaatcccttatattagattatatgagatattatgttattattattattatattaatcccatacaatatttagagagacaacaagcattttgtaatagcttaaaaaaaaagaccactgaaggttgagtgatgtggaaaccatgagaatatagagagtttattttctcacagcctacatacattgagttacttttcaaaggctggtctcatgagagaggtaaaaatgtatttgcctaactgctatatataggataacatggaaaatatatttctgaggatactgagctgcctgccaaagattgtcttcacatgtctactgacaattaatcaaattagctagcttaaaaacaagtagtttagaatagcaagcaattcagtaagagtatactgacaatttatatcttttgatattttccttccatctcatttgctgatggttgagggaagcaggaaatgtgaagaaagcttgtgcatgctttattgtttctgaaataactactttattcactagatattttaacatccattctgaattatcctccaagttattattaatactttgtggaattaatagtaagaccatcagtatcttgtattgtgttaaagtacttaaatctgttaagacagacctagaaagtttgagggtagtagattttcaggcctaaataattaaaaaaatatatagaacatatgaattagagctgttatggtcaaattctaatgcctcccaattgtttacagaatgagatgagaactctttgcttttgtgtttaagactcaccacaatctgctttctctctgattccaagtttagtttccacggctatgcagcatcttgtcttacagcagccagtatccctcaggcatacttacgttcctcctgtcaccacttccgtgccatgcctcgtttctccaaactcacctctaactctctgaaacctgtgactattactggggggtaaaacatttgccccaggtcacctagcaaggaatggggaaagccacaattcacaacaaggcacttggcttctgaagcctacagtttgaaccactccattgaatttatagaacaccgaaagcatggtattgacagggctggacttgaatcctggctctgtggttcccagccaggtgactatgagctatatatttgacttctataatccataaaatgtttttttatctgtaaagttaaaataataatagattttccttcatagatttctgtaaagattaaataaggtgatccctgtaaagtacttggttcagtgcctgctctataatgaggacccaataaatgtcagatgctattttcacaactttatactgtaagataaatgtgcatgtatatacatgtatatatgtatatgtgtatgtatatttatattccccccccagactgaattggttgaattttcaaagtggggaaatagcctgacttgttttgctaaatcctcttagagcatcaaaaccatttcttgaaattgataggtgctaaatatatattttgatgattaattggtatttatcttttattctttgctttaaaattgtccagttgcttattaagagcacgactattaatgatttatgcaatatgataggcgcacattctgttagaatgatcacttctcaataatttaaacattttaaatgatcctttgatactttgttaacattcagtaaatatttgtagatatttctttctttgacaaataggatagctaacagtatttatgttttcaatcttcagtctctttttttatgccataggaaatgttttgctagtgttttatcatagctgggttagtatggggaatgaatttagtattcacatggatagataacacatgtgcttttctaggtgtttcactatcatttagctttagctaataagcacttaaagtcttgttgatttttccccaaagacccttagtcatctataacattcttgaataattgagctttaagtggatgttaatagggttgattatttcagaaatatacagaaatgtctttacaagattaaatttgaaatttgtattacccctaagataccaagttttgaaattcccttctcaaaaactgaaagttaaataatacatgaaatagaatgacttgggtttttgttattagaatttatatagataagttctattttgtaaaaatattcaccctcattgtagagcccctcttaaaacaacaacaaaggcaacagcacctggatcctaaaaatcgctgccagtataaataaaatgcatccgtaagacttttcaagaaggcttatttttaggatattctcatttcaaagtcaactgttactctatgctctaaagctgtttcccttattttagattagcatatacctgttgacatcaattagtcatctaagaattggctgacaatcatttggaaaatatcatcgttcacacattcaacacttacagaacctaagtccatatttttggcagtggcaactggatttggatagagagggattggagtctttccccaccattatcctcgctgctttggaggtagtttcaatagaacgtgagtgaatagtgggggcaaaagaaggcaggataacatttacaactattttctactcattcataagaaatatccttttcttttctttgttttagaagaaatggcccaccatgctccaagagcaaaatatcaataacctcatatttgtcatctcttatatcatcttttctaatacccacagcaaccctgtgaatttagtaagttattattatcctcattttacagataaggaaactacaattaaaataagttaattaacttatgaagatgacacatgattaaatgaaagaactgagacttctttaatagaggtctttgcctttaagagcgatgcatttactactctgcatattgcctgagctattccacagaaagtggaaaataaaatcattggcaagttaatggatacatctttaatggtattcataattgtaattgtgctacatgataataatggcatagcagacaagcagtgcacataaatggctgaaattagcatgactttgaagcatagccatacttagtatttctgacatctgggatgaagaggaaaagaggacagggcagagtaggaagctgctaagaattctttctagatctgtcactcacagtctgcttttgggtaactgaaaacttcattttatttcccccccttcctatcaaactagttgagaattaggtctatgtactacagtataagatgggctgtgggctcaggtcaaatctactgttctcttagaacaggttagtttcatcagagagcagttgcctccacccaacacacagatattagctagggatgtttcctttttgtactttagtggtgtttttctcttaatcctgaaagagagaggtgatatgcagtttgtagagaacaaagcaaccacagcagttactaggtacaatctagaagcagtttgctttgacaacactcatctcaatatctgtgcttccacctccccacccaagttcttcttggttatccttttctagacctcttagtgagaactagagtcctcttcttgttctaagccctaacctgaagcattcccaaattcttctaattctcaaattattttaacctcaaagaaaacttttaatcctttaatatagaccaagattcagcaaactcttttggtaaagagccagatagtaaatatttttgctctgagggccagatggtctcattccccactactgatctatgccatttgtactgtgaaagcagccacagcgatatataaacaaatgagcatagcagtgtttcaataaaactttatttacaaaaatagatagagttcaggctggatttggcccaaaactcatagtttgatgacccccgatgtagaccatctctctcattatatactatgctctggcattaaattcgaaaaaggagaaaggtaaaactggcattggtcctgattcggtcagtcagtagtgaaatatcaaagcacttacaattggctaaggtttgtactccctgctgcagatttagggattaacttagactgggatttttgattcctgctacttccccttcttctctccagcagaaaaagagcaggactatataggcacaggataatccaaattagtgtttcacttattttgcaactgaatccatactctaccaagaaagcccttagtaaactttcaacctgggcaaagtttacctatctaccttctcttctgaatcttgtcttgtgccttatctctcattctcatgaaaattggtgcgctcattctatttgctgggggtcttccttcatctcctccatattccacactcttcctcttccactccttatcctcttcacagaatatcttctcactctattcaacaccaacacaataccctcagaggcttgaaatttacaaattacacttcttctttattttattttattactattatactttaagttttagggtacatgtgcacaatgtgcaggttagttacatatgtatacatgtgccatgctggtgtgctgtatgcattaactcgtcatttagcattacgtatatctcctaatgctatccctccccactccccccaccccacaacagaccccagagggtgatgttccctttcctgtgtccatgtgttctcattgttcaattcccacctatgagtgagaatatgcggtgtttggttttttgtccttgtgatagtttactgagaatgatgatttccaatttcatccatgtccctacaaaggacatgaactcatcattttttatggctgcatagtattccatggtgtatatgtgccaccttttcttaatccagtctatcactgttgcacatttgggttggttccaagtctttgctattgtgaataatgccgcaataaacatacgtgtgcatgcgtctttatagcagcatgatttatagtcctttgggtatatacccagtaatgggatggctgggtcaaatggtatttccagttctagatccctgaggaatcgccacactgacttccacaatggttgaactagtttacagtccgaccagcagtgtaaaagtgttcctatttctccacatcctctccagcacctgttgtttcctgactttttaatgattgccattctaactggtgtgagatggtatctcattgtggttttgatttgcatttctctgatggccagtgatggtgagcattttttcatgtgtcttttggctgcataaatgtcttcttttgagaagtgtctgttcatgtcctttgcccactttttgatggggttgtttgtttttttcttgtaaatttgttggagttcactgtagattctagatattagccctttgtcagatgagtaggttgcgaaaattttctcccattttgtaggttgcctgttcactctgatggtagtttcttttgctgggcagaagctctttggtttaattagatctcatttgtcaattttggcttttgttgccattgcttttggtgttttagacatgaagggcttaccgatgcctatgtcctgaatggtaatgcctaggttttcttctagggtttttctggttttaggtctaacgtttaagtctttaatccatcttgaattgatttttgtataaggtgtaaggaagggatccagtttcagctttctacatatgactagccagttttcccagcaccatttattaaatagggaatcctttccccatttcctgtttttctcaggtttgtcaaagatcagatagttgtagatatgtggcgttatttctgagggctctgttctgttccattgatctatatctctgttttggtaccagtaccatgctgttttggttactgtagccttgtagtatagtttgaagtcaggtagcgtgatgcctccagctttgttcttttggcttaggattgacttggtgatgcaggcttttttttggttccatatgaactttaaagtagttttttccaattctgtgaagaaagtcattggtagcttgatggggatggcattgaatctataaattaccttgggcagtatggccattttcatgatattgattcttcctacccatgagcatggaatgtttttccatttctttgtatcctcttttatttcattgagcagtggtttgtagttctccttgaagaggtccttcacatcccttgtaagttggattcctaggtattttattctctttgaagcaattgtgaatgggagttcactcatgatttggctctctgtttgtctgttgttggtgtataagaatgcttgtgatttttgtacattggttttgtatcctgagactttgctgaagttgcttatcagcttaaggagattttgggctgagacaatggggttttctagatatacaatcatgccatctgcaaacagggacaatttgacttcctcttttcctaattgaataccctttatttccttctcctgcctaattgccctggccggaacacaaattacacttcttaacatgatggtatgaaggatgcagattttcttgtgtagaagacaagcttgtgaacccaaatgatactgcagctgtgtatagtcaagtgtgcatctccatgctttgtgtaagccatcagggatcaagcccttttccaggctcaacagaaattaagctgaatcctgaataaagagggcctcccgtagttttctcagtttgctgtaagaagaatgaaaagaaagcagaggtgtttattatgggaggtactggcagctcaaggcgtaccttgctgtaccagttaaaacagaacgtgtgtgacagatgaatttaggccagtgcacaccattctgagaagtatgccccaatattggaaagtagaattaaatatttaaatatgtcaaaatgaaaatttgcattatctccacccccttctcattgcttctctcctgattttccaaggatggtttttgttagaatatctaggtagtgaactttgactcaattgtaaatccaaatgcctacaagactagagtctaggtagtaggcaattgatgactgggtattttaaatgagaaataaaaacttgcgtgagtatttgtgaatagagaagtataccaagcagtttttgttggcagaaaatggggataagattctatactaatctgaagagagaattcaatggttatgttgtaaaaggacagaggataatgatgtatataaaacaaggaaggaagtctataaaattcaatcaacttctataagctagtttggtacaaaaaaaaaaaaaactggggaagcttgaaccagctctgcattcagcaaacataatggatcttggctgtcagcctactctggtgcatttattttctctagggagttgtttttatagtgcaagaaactggtctaaaaggagttggggttacttgagaattgatgatttactatttagtcctggaaaagctgtaatggcttggaagtctaatctgcacctggtttcacatcaacggattcatctctcttgcttgataaacatgttcattggacaacaatgaaacaactggggtaattatgatgtgagctgacactgccggtataaaggcagcttatggttggacccagcccagcaaaagcaagatgaagactgcattgaaaattgaaagtagaaattcatcaaaatttctccagagatgaatgggctctcatctctactcctttctaatagcttcctcatctttcctctctccatgaactaagggctactaaccatttttgtgctatgactgcccttggctttttgatgaaatctatgaaacccttctcagaaaatgctttcaacgaacacaatacattctgtagaattataaaaggaaaacaaaatatatcaaaatacaattataaaataaaaattttatgatgtgttcatttacatgctcctttgcaacataataaataaaaagatctcagcggtatgtctaataaccattataatttcaaagtggggatgggtttaaatagtattttgaaggttgttacagaaaatatctgtaatttctactggaagtaaaataattggtattgacagtagtcctgtagttttatctagattcataatgtagtaggtggttggccaaaagtaattatttttccctcccaagttcatgggccctctgaattctgtcccagatcaggaatacctgggctcagcttaagaagtgctgctatttgctatcttccatttttatccttgtacaaattgggaatcggaggtccagattaacagctacacagtctcagatctagagctcccagctacatatctaattgtcccaatgccaaatccccaggagagtcaatccgatgggccaagggccagatatccattccgatgccaaaaagcaatagaagggtagatagaaaagatcctgtaagacaaacatgtcttcaacccactatcttgggaacataaagagagatttttcaaagaaagtgtacgtgtaaggcagatacctcaaaaggagccttttataagtacaggtgtgggacccctaacagcagctggaaaattccttagcagagccttacagatacaatgagggagttcttctcatggtgaaaagctatcactattcattgggaagaaaagttatctgtgcacaaataaaagtctaggctgttaggtgttttacaagtccaatatgacactgtccagtagaacattctgtggtgttggtaatattctatagctgcactgtctaatgcagtagccactagtcacacatagctattgatcacttgaaatgtggctagtgtgactcagaagctaaattttaaatttgatttatttttaattaattaatatttaaatttacatagccacatgtggctagtagctaccacagtgaatgactcaggtctaacctatcccacactgcatctccatcagtttcctacaacagcagcactccagtcaaactagtaaagaaatcttaccttttggcttctgactttgttgaggttctttgcctagctcaggcatacactcatagtttttgtccatttctctaggtcattctacactttatattcctaactcatatcccaccttctggaagacttctgttatcagccaagttctctgaagtcttaagacacctattgctatatcaccaattgggacaaatcacatgtcacttgcttcagatgtgtgtgtgtgtgtgtttttttccaaaagttttatagtttttcttcaagtagagtgcatgcttctgaggagaagaaaaatttctcatatcttttaaaagaccttgttttttatataggtgttcagtacaattttgttgaattagttcactgaatgctttggagatgtagatgatgcaaataaagagtggaaaaatccatcaaggcaaagatgcctgaaggtagagtcactgtgtgccaaaagatcacttaaatatcttaaagagaggtcagaaattaatttggtgctatcttttggcaaataaagtgttctccttttatgaatgaaacaaccaaagtctaatgatagtgaatgatttgccaagatcatataccagtaaaagatggaggagaaactgagacccaggcctttggcattcagcagtattctatagagcaagatgctagatagattgggaactctttaagaagcaagagaacaagcccaacagaaagaagaagaggacaacagaaaggaagctcacaaaaagaaatagaagagaaggtttatgatggatttccttgatttattcagattgtgaaaacctaacagataaatttccacaaaattaaagaaaattcaaatattagatgggtgaagaagtccctccaattttaaataccagtaactcatcatttacctgagactagaaaataactagatatgcttaagatgcttctccattcttgttggtctccggtctacattctttctgataggtacctagtgtgtatattacacttcacatgtgcatggcatactgcagtgaatcaagcaatctgggagggaaaccttgccagaggagaaatcactgagaacatttcctctaagactccatgtaaaaattgaagaaagtgttagaaaaaaaaaaaagatagccgtctctactaaaaaaatacaaaaaacaggcccggcgcggtggctcatgcctgtaatcccagcactttgggaggccgaggtgggcggatcacgaggtcaggagattgagaccatcctggctaacacggtgaaaccccacttctactaaaaatacaaaaaattagccgggcgtggtggcgggcgcctgtagttccagctactcgggaggcggaggcaggagaatggcgtgaacccgggaggcggagcttgcagtgagccgagatcgcgccactgcactccagcctgggtgatagagcaagactccatctcaaaaaaaagaaaaaaaaaaagatggccatgaacgttggatgtgaagaagtgtctgaaggaaaaaatcgcccatctttttattttctatccagtggcagcatcatagagggatgataaaattcaacattgcataagcgtcatataccccatatacccactggactcttatactggtacctcaaagctgtcctatcagatctggcctatttttcttcataggctagagttaggtaggaaacagaagaaagaaactctaggataaatagttagatctttgtttagagaaaggagatccaaaagtcaaagaattagacatccaggttgtgacttgctaagcatacccactggctaaacaaagcactggcaagaacatttcgactacgctattgttactatactaaaatcattctcacctttaaattgggagaaacatgctcgataatctttcaaagtgtccagtgttctaacgttcttactgaatgtgtacagcattgcacaaagaccctcaaattagtaagactactttacacaatgccaaagccagtgtggttttcatgggttacaaccaacttttgctccttagtcataaactggaaccttttcaagtcattccataagttcttggaaaaatgtccgatcaccttaatatgaatttgtctgaaaaaccagatatcaaaaccaaaagagtgtcgagacaaaatatatttatatagataaggaacaccttcatcttcaagaggagccaccgtttaagagaaccagcctatcagtggagtcaatggagagtgacttccaatggagagtgaacatgtcagctacggaaaatataaaaacaaaaatctgacccattgagtgaccatgcctgtctactacaaatatggtgctgtgctttaaggataaatataagtatctttttgataataatattattaataatgtgcatcatgtgcttatgatattccaagatactttgttaaatccttttaaggattattttatttaatccttacaataatcttaatgtacgttatttctattattcttatttgattgatgagggaactgaggaaagacaattaagttaattgcccacaacacatgggaagggtcagagctaggattcaaaagtaggtaggcagactcaaagtactgatactcttaactactatgctatagttcacaccttgaagtcctcaacataattatccagttttctccagcttttaaataataaacaatggtattaagaggaaaaaattgtgtgagaatctccattttgaaaaactatgacttcttaaagtgaattcataaatgaatgtttatgccccctgcaaaattcctatgttgaagccttaaccaagccttaatccacagtgtggctgtatttggagatgggagcctctaaggaagtaattaaagtgaaaaagagtgggtccctgatctaatagaattactgtccttataagaagagatgctagaggctgggcatggtggctcacgcctataattccagcactttgggaggccaaggtgggcggatcacctgagatcgggattttgagaccagcatgaccaacatggcgaaaccccgtctgtaccaaaaatacaaaaattagctgggcatggtggtgggcacctgtaatcgcagctactcaggagactgaggcaggagaatcacttggaccctggaggcagaggttgcagtgagctgagattgtgccatggcactacagcctgggcgacaaagcgagattccatctcaaaaaaaagaaaaaaaaagaaaagatgatagctctctttctctctgccctatgcactcactgaggataggccttttgataactcaatgagaaggcagctatctgcaagctaggaaaggagccctcatcagaaattgaattggccagaactttgatcttgacttctagcctcgagaactatgagaaaataaattttggttgttgaagccatccgatctatggtgttttcttaaggcagcctgagctgactgagacagaagctttaaactgtaaattctcttgtcaaacaaggtgttgtatatttataacatgaaaaatgatttttaaagatagtcattgaagtggaaatcttaaactaaaaacttgtcacagaactcatatctctcccctccttaaaaaatatattatgaatccccagtgtttgtgactcttctgtaggagaaaacttgagttaactgttactagaactctcatcagtaaaaatgtcacattattatgcctatattcaaagatgaacttagccaaattatttgtaagtggtgaagtaaagaagtggacacctagaccactcccattgtttccaaatgtttgcagcagggaccctttcctctcttcaaacaaacaaaaatattatagtatgaagttctttcaaagaatggagtgtcacatttagttaaaatagagatgaattcagcataactcttaaaataatttttacagtgtaaattttcctttcagtttccataggcagattaatgtataattactctatagaccactagaatattccatttcttcttcttctcctccttctcctcctcctcctccttcttctccttcttcttcttcttttatttttttctgagacacggtcttactctgttgcccaggctgaagtgcagtggtgtgatcacagctcacagcagccttgaactctcaggctcaagcaatccttccacctcagcctcctacatagctggaactacaggcatatgccaccatgccttgcttattttttaatctttttttagagactgggtctcactatgttgccttcatagtgtgccatttcactacgtggctggcaattttgtctttaaatggagatgatagtgttgtttatgttataagtggtcgttatgaacatcaaaggaagtcatcctcctgaagccttgaaaactgtcaagttctactgaaatgtcatagatcattattactgagttgtttactttaaatgaccaataccacattttgaatttaaatcatgtggtactgtattttaaggaggtagtaaccatgtaagtttagaagaaaaattcaacatgccctgaatgtgtttttaaaaatagattacattttaagtatatttggtgacaaaatatctgtaataagtacaagttttgttaaggctataataaaatcataaaccctgcctaataaagaacttgttctggctgggcactgtggctcatgcctgtaatcccagcattttgggaagccagtgcacgccagatcacctgcagtcaggagtttgagaccagcctggctaagatggtgaaaccccgtctctactaaaaaacacacacacacaaattgtccggacatgatagcgggcacctatagtcccagctactcaggaggctgaggcagagaatcgcttgaacccaggagacagaggttgcggtgagctgagattgcaccactgcactccgtcctgggtgacagagcaagactccctctcaaacaaacaaacaaaaaaagaacttgttctatgggtaaagtgatgaaaattaatatggcagatttctgcagaaaagggatatttaatttcaattcaacctgcatatggtgagtacttgtcacctgtaaggtgctgtgtcagcttctgggacataaacagaaaattattgtgtatctactattggattgttttatatgatatttggtggtgatagggaaggtaagtgtttttagggacattcaggtaaatggtgtttgatatgctttggctgtgtccccacccaaatctcagcctgaattgtatctcccacaattccaaggtgttgtgggagagacccagggaaatgtaattaaatcacgggggccggtctttcctgtgctattctcatgatagtgagtaagtctcatgagatctgacaggcttatcagggggttccccttttgcttctccatcatttttttctcttgcccctgccatgtaagatgtgcctttcacctcccgccatgattctgaggccttcccagccatgtggaactgtaggtccaattaaacctcttttcattcccagttttgggtgtgtttttatcaggagtgtgaaaatggattaatacagtgtccattgattgatctgcagcataatatgaaaggaatgaattggtagaataagacagccttatcaaaaaaacagtggagtattatccttatatacctatttcaagggcaatatttgattgccaggcacaggcctacttttcaaatatatggttcatgcagcaaacaataatttttgctttttggttcttgatacacaaagcacccagtatcaataatgatacactaataacctaacagaaaagccctatacataactttttttccttttcttccatgatgttgaatcagaggtgcattaaatctggctcttgtgacactattccagtttttatgtaaaaaagcaacaaaattctgctcaacaggcagaggaatgaaaaaagaaaatactaaaaatgatttttgcttaggtacatataacttctatgttgtcatctttattttccatctgtatctcattctttgttttcaggctgtaattgtcagcaactgttcttcaggtctataaagccttcaaagctctgaccactggttgttattattattattattattattattattattattattattatttgagatggagtcttactctgtcgcccaggctggaatgcagtggcacaatcttggctcactgcaacctctgcctcctgggttcaagtgattctcatgcctcagcctcccgagtagctgagattacatgcacctaccaccatgtctggctactttctgtatttttagtagagacagggtttcactgtgttggccaggctcgtctcaaactcctgacctcaggtgatccaccaacctcagcattccaaagtgctgggattacaggcgtgagccacccagcctggccggtttttgtgcatttttgacttccagcttagggagagagcatgcctgggtgggtcattccctccactatttctatagttttaaatgtgtttgttttttaatcaaagtgcattattctgcattagtcagacctaagtgggcaaatacattctccaaattctggaggaaaaaccaacaaaactcataagatgtgttgatttcaaaatatcaagtgccctaaattcatagttgcagtgaaaactatcacatttgttaaatgaaggagttaattatgtaagattcttatgccaggaaggggaaaaagaaaaataagtttattttttttccatatctgtcaattgaaaatataaagtgttacagctgaaacatgaatattttaaagtaagagcaaatgcttgtaattcttcttgggcagtggtttcaggcatgtcctttactggcaatgaaccacatgcggggagaatctatctcactgtgccaaggagttatttatgcttgccttagacgcccaggacttgagtttattacacatttttctcctcttttgcataaagtagtccaaatctctttccatttacctatcatattttttcattttaatcaggtgcaattttgatttttctctttgggttcatgagtaatgtttgcaaaatcaaatcaatgaaaaaagacactgtaatttatattttcatattttttcctggggttcttacagagaacacagccccaaacccaggggaaactattcccagaagtgcaatggagttgagtatcatgatcttcaaactatctttagtttatacggtttatacattgaagaaaataaatgcaattgtgaatgcctaatggaactctctggcacatactactgggtacttatatatagtctgataaaaaattaaaaccaatttatcaaaatgacaacacacttgttaatttggaacattcttaatgtccatttaaagtgcaatactcagtaatttattccattttggagatttcaagttatcagcatttagtacaatttatagctcatgcttaattttgctattatttactttagcaaataaaaggcatcttactctgcaaaaaaagtgctgattcttattttatggagtacctcagtgtaatagatttagtgtggaaaacaaattgaaagccttctaccaccaaattagagttttaaacttacgttagctcttaggtgcgtggctctcacactttagtaccttgaagaaacaaccaggaagtttgttaaaaatgcaaatccctgacttctagtccccagggactcttatcagaaggtgtgaaatggaaccaagtaatctgcattgatttttaattatcacccctgaataattctgtttctatgaagcattttgagatactcattttgagataaaagaatttgtgttttttgtacacaatgtcttttttatataaattattgattaatagctttagtaatcctaaaattaatcaagtggatgattatttttgagaatttatgtgatcttttaaaaatttaatttttagaaattgttccattttgtattaacattacaaattgtgtcattaagactaaacaaaaatcaccaaatcaataattcacttaatagactgtgatctacatggaaagctatacatatttaaatttgtcaggtgtatccttttcttaaacaacattattcacagggaaattcagataatgaaacatatcatcagaaaaataaatacaacaagcagctaatatttatatacactgaaaagaataggctgatttagtagagtaatattctgtggtgttacaaagacttcccaaagaatatggattttagaagtatgttcaatgctgagatctcattctggccatgtactgcgataatgttcattactacggaaccaaaatccaccttgctgtgaatattcaggcttcagaaacaagcatattctaagtgacatcattctaactgataacctcatttttttctgacaaggagctaacaatggtgtcattataaaagaatggtttaagaattgaaggagataatatatgctgctattatgggtaagagtggaagaccagtgagtcccctacagaaagtcactcaatcctgaaatatttcctcaaacagaaaagtcggttatagaggaatactagatgtcaactggtagataacaccttagacttgaaattaccatctaagaagaaataacaaaaagactttttcatggttctttatatcccagaggccataggagagaatcaaccttattaaaaacaaaaatggagatgccacacatatcgtcaaggatatgaatatggaaataggcaagttataggtatacaaataaattctaggctctaggaaaggaaaggcagaagggaagagagactcaagcaccatcaaagtatagagcttcagagcaacattccttctctggctcttgggagatcttgacagaagagggcagttcttaggtgttgagtgactagtcggagaaaaggagaacgttacaagcaatttctaaggaattgggagcccagggcattcctgctcttgaagatactatggcaggaaccttaaaagtttcatttttttctgacatgccatctgaatttgaagagcctaaagcagaagaaccagaaaattcagttacctaggtctacatccattatccaggcaaaaggccatagaatcaactctattggtactgtttatgtttgccaaatgagcaatttcaaatattaaaacgacatcaatacaggtttctggagaagctcactgacattaacagcattgccaaaaatgtaacgcaaacttcttaacatttgtcatatttagggagttctatttttcagttcattttcatagagctggaaaaaggaaacataaattgctgtggcagtaggggaaggaaaccaaagtttagcgaaggcttatcatgggtctcacattgtgttatgcagtttatatatggtcacatttggtaagtttaggatatatgtgaagtgtactaaagaagcaagagataacatgtggtttacagacatttcaaggtttaataatgaacctgctatctcaaactactttaccagtttaacttattaattgttgaaattttcaaaccaaccaaccctgagaagagtctgcgaatctatacattttcacatacacatccatttacattcattggaacacctttttgaaggcttctacaactatagttatcagtcttggaaaaataaaaatgatgtattgaaattttcctataactgtcattgtgacggttgtgaggaaggtcagggcaaattatacaacaacacggagcatgggttttatttgggaaacttacaaaataaaattaccttgcaaaggttggcaagaagcaatgcatatctcccttttctcagcattccatagagaagtatgccagctatgagcagtgcagcttgtgccctggtaattccacttcttacagtgtaagcagagaatggcccaacggtgactgtgttagccttagttttcctgaaagcagagatgtttgagcagtgtatttgggagtgtgatttcacgggggcaagaacaagagatgggcaaagaaatacacagaaagagagcaaatgacccagtataagttatccatttagtcactgacaagttggctgacaagttgctcaacactgtggaacagcctgagtggtatgacacatgtcttgggatcatcagctcaaagggaaaaaaaggggaaatattcacccattggcatctgtctctcaatggccaaaaattgtcccagggggcattaatttactctgcaatttctatcagtcttctctttgtgtgagaggcgtcctagcacaggatcgaggggttcttatccaatgcctgaggggaggtattgtcagattgcctttatagaaaactgatcagagttcatggctggaataacaaacgatgtttgagtaagtgtatgatatgcaaatttcccttcaggtggagggcttgatgttttggactcagttactaataggttaggtgccagctgtcacagctcagctcctggagacctagtgagcccatgggagattgcaacatcttctcctgggagccacccatcctgtgggaatttggttttgaaatgcagctggagtaaatgcgggattccaagatagcttgtccatcaccaggcaatgaaggaagggcactgaggctcacctttggacttcctggttgacatcccatggtcaggtctggatattcagtgtgtaaattcattctaatgatattaattttaagaatgttttacaatttttttctaattaagtattttatgcacatattaggaaaaaaaattgatttggtaaacctaataaatttgcatcgaacctaatattttatgttcatgaattgtaaaggaaagcttagagggaagattctctgtgtcttgcttttcagagagagacacaggtatgggtcaaagggcgcttagaaccttcccatccttaatacattatggaaaatattgactgctcttcatctttgatatcataaattagagtattatgttcataatgactattttctatttaaggaggttttttgtgaaaaacattatctttttctgaataataactccttcaatgctatctatcttctccctcaactgtgcctttgcagctgaataactgattcaccatactactgaacaactttttgatgacttgaatttatttatttattttttaaaagccaatacattcatttgccattcttgtacttcctgtcctgcttaaagcactttttgctatttttttgtgatgtaaaatcagtccagtttatctccattcaagacatctttattgaaaatgacttgtctccaggcttattttggtttccctttccaatccttatggacaactggttagctaattgagtcactcccaagccccacttctgttaatcagtatatgtaataagttgatggagtgtaaacatttatttaataaagagaatgtcacatcggttgaatgtcacttacagaagttacaaaaaggagccatccatttattctttcaacagatatttgttgaagcataagatgcatagcatgctattctctgtgttatgggatattttaggatgtaaaagacctggctcacaaaaacatgcaagctaatgttactaacttcattttgtcaagcaatttggtatgggaaataaccagtgggaaagcaagtggggaaagaaaaataagtagaaagactctgaacatatgttcaacacagcaggagacagtgttatagacctgggatccaacttgtaaaaagaaagtgtgtagtggcttgcattttgaaaagaaccccatatggggaaatatactttgtggcaaagacacaacagggagacctagatgagatcatgagtattttctctgtggaaccacagagaagaatttagggttaggaagcccattagcagatgacatgcccaggagcaacacttagccactgcctgggcattcgtagtggcttgtgtgtgtaggaagcttataaagctctgaagattccactcatttgcctttgcatttagcatcttctgtgcagaaaattagttatgctgcagccttaaaatgttagttatctaacattttagaaaactagctacctattaggttatagtaattgtataaaaacataaaattaaccactagctagaatcatttttaggatttcttcacttttaattaaatctaacatcaatgttataaaacccaaaagaatacaaaaagatttattttgctagtaaaatgaattttcaaatgctttcaagtcccttggggactaaagttcaataataattaaagtcttttcataccgcatgtgggaaagggccaaacaccatgttgagatttcgtgagtcttctgtaccagcaaagagaggcagtagaagaaagaaacacttccctgctctgcattaagagaactattaggctgccattcatagtgcaattttttgcagtcctacagaaacacatttctaggtctttagacagttgagttccaaaagggttttgcaagaatcaaatcacatgtgagctgagtcaaaaatcaggaggtcgctttgtaggtgaagaatgtggcaaacataagatcggaatgaaagcaaaattgagagtcggcagtgcaggcttttggaggcgaaagcccaaaagacaggccaagaaatgctttcgatgttggaccttggggataaaatgatgatttgtcaaattactaactaggtgaaaaaaacaaaaggacattctccagccaggatcatgggaccagaggtgttgccaggtcaaatgacattaccgggtgacttattgctcttggttttttcttgatgcacttcatttaagttaacattttcattctctgtgttgtattttacgtatagtggttttctctacctgaagatttttggagtatttactcaatgacttgtttataatttgtttcctcctctttcaaggtgagttggctaagaacaaggacgttttcctagtcacccactgtctccaagcttgtgaacagttactgatagcactcaactgtttttttatttaaaaaaaaaataaggatgaggtctcagtatgttgcctcaggctggtcttgaaatcctgagctcaagtgatccttcctcctcggcctcccaaagtgctaagattacagacatgagccaccatgcctggcggcactcaactgttaaatgaatgaataagtgaaatgaacatttttcaataacaacctcagcacaccatcactgctgcgtagtgtgcaccaatgagtggtaatgtaagattttattgttggttaaagctcagatgttttcagcagacagagagcttggaagcagagcaagctctgataatagctcttgctctttgtgggtgtgtacagtgaattttaattcaccttgtttatataagaagggtataatattaaatataattttggcataggctttaaaaaacaacagccttaatatattgataaattagtactttgggctgttgtctcttttctcccaaaagaaaattcaattagagttagggtcatgttgtcccataatgttcgacagaagagtgtttgaattccatagccgatttttagaaacagtagcttgagttattttcttccctagtgcagttaccatggaattgatataaaaacttggatatttctatattactcatttcagaaatgtgttcaactttaaggaattatttgggtcttaaaaagtattttgcaaccaactcatctataccatcaactcctgactcaccttcaagcaatgttctctctctctctctctgcttttacccccttaaattggaactgatgttttatatctaatctgttatagacaagatacaaattgcatgagggcaaggacattttctggttcattccctgcctagccctcaatgacatggtgaatgcctaacaacaacaacaattctaataaatgaaggagaagttagtgggctgtttcaagcagtatttcctgtaacagctgtgttttggtggggttcggagtctagttattgactgcatgtttggaaattagtttttattagattttgaaaaccaagatcataaactttttaaaaaatttaatgtttttatcatatttgttcaaaagtaaaccactgctaaaaggcttataacagtgttccccttcccccttaccttccagcccacaactatcctcctcaccaatatgatctttctttggagatgagaaatgtcatctttcttagcttttctggtacttgcctccttattttcaagtcctatatagcattgctttattttggttattaattttaaacattatccaaccctatcacagtgtggtgaaaaatccatagtcagtattataattattatgactaatgtaaatgctattcaaagtgaacccaggtggcacactatatttatagtatattattatagtatcttttcctgggttaagaactgaaactttttcttctagttttcttggtttgctttgaaattatggttaagtcatcatacaccttccaacagctgtataaaatcttgtttcattcaaattccgatacagtgaaatctacctggtaatctctccatttcttcttcatctgtctttcccctggaagcatccttccggtggtgggggcagggggtgcttttgtccaatctgaaatggctctcctctgtttgaaagcttcttctcaactataatcttggaccctctgtacctcctggtcatttcttttgtctctctcgatttggattacctgctttctgatctttagtcttgctccttcttggtttattccattatgggtagagcatccactagttcttggagaaatagagatcaaaggtaatttttttaagacaacatttcataaaatatccttatttcattttcatgtaaggctgattgtgtcattggacgtgaactactagaatggatatcatttacatcaagaatctgaaatggattgtgctactgttgtaggacttcctccttagttcagctaaaagctgggatcttgtcacatgaccatgaaagattaggctggcagatactttgaagggtgagaagagcaggtttcattgggtgaaaggtaaaaaagggaaatagggaccctcagcaaagcaagagtcctgagtgtgggtttcttgcctcacagattgaaaccctagttatcaccctgggacaggagaagccaggctcctccccactggaaagggcacaaacttcccatggctccacagcattctcccagcgcactggccagtcggaggttttccggggagccctttatacttggctgtctcactaccgtcctctagctttctatgttgctattaaaaagcaaaagcaatttttagtccttatcttttaatgtatcccctttttctccctggaaggtttcctctttattcctgctttttcttttctttttttccatttatagctttaggcacttggtagtaagtctttaccatctggagacttacatccttcagagtgaggaattatctgattttctctatggaactcctgttagtcagatgttgggcctttttgcttaatattttctttactcttttccctcctattggttatcgctttatgtttttgatcttccgattcttttgttaaatttttattttctaaatatctatttcttgtttcatgagtgttcctttttatgcattttcatgttgttctgtgggttcaatacctctcttacctctccagggatacaaattacagtgtttttttgttttgttttttgtttgtttgctccctgaattcactatagttcttttctcattttaattttagatgttttctatgatgtttttgttctttactaattaatatcaatgcgttcagaagtaaatggaaagttctatgggtgtaggctgcagttttgcactgctaaacctcctgaggttcccacaactggccagttagcttctatgttgtgaaatctccaaatgcctgtattcccacaggagttttctcggaggcagtacattctctcttacacacacctgggggttattagcttggctaccagcattctagaatttggtggaaaagaaaggctcagggtccacagttcagttagattaattcctttttttttttcaatatgctactttgctgtctttgatgcctcatgctcgcaggtgtagtaaaagtggggcagtcatctgaaggtgctcagagtggacaggaaccaggaatctgaagctaactgctccctagtggggcagtcatctgaaggtgctcagagtgggtgggaaccagaaatttgaggctaattgctccctagcagtttctcaagtcctctccctaattccttcaaattattctgcgtaattccaattcctgagtcttttataacttttaggggccaactatgtatatccatctgcaagagcttattctcctccactcttctaaactatttattattcttacattgactttagtcttcaaattctgtggcctgggactatagatatctattaatttttaatgaatatattcaatttttttgtttatttgtttttattctattttcctgaattttagggggttggattttgagaggagaggagtggaaatatcttgattccatcaatttagaaatcacagatctcgtgatcagattttgagggatagattctcattgtaacaacacctgtcagaaatttatttttaaaagagaattacaatgtattaattaatacttggaaatattatcactaagtaaattagaatatttcttttgattgccaaaggcagttttgttcttctgaaagaatcagcttcagaagccaaataaagatctaaacattcatgacgggtgttgagttatagcagagaaagttaaatgttctttatggttaatgttgcattacctagcctgttgccacaaccctcatgtaagtaggtgcctgccaaaataaatagaatgattaaattgggcagccaggaattaccactggacagttctgataatccacaggcaactttccattcttctttctttattcttcacaaatcctactaatatttgttataaaaatagattgtacaattatttgagtgataaagaaatatttatgaagtgtccactctgtaccatatacatggtaatatgtattatttcattattctttgtcagatattagttacattttaaatttatgtctttttaatgagattccagggaagtacctggtttcctgatgaaatttaaggaattcccattatttgctttaatcatttcctgggaaggctttcacatgtgaccaaatacattcattttatagcttttattttaattgttgattttttatgactttgttcataattctgtgcatacattttttgtttacccatattatacattgactacatactcaatattatacaaaccttcattgtttatttttccataataaacaaggaacatgaagtctttgcatttggaagagtcttcaaaggcagatcagagtccaaaacctagcacaagccctcactccagtttggtgaaaagcaaattaaaaaaagaaaaaaggaaaaaaaagagagtaaacaaaacacatatgcagaaatacaccaacaaaaatacacgtcgtccatcactgcacattcttctctttcctggaaagaatggcagcgactatgaagagtttttcagaggctagatgctcccgtgaaatttgcacctggtcctgaggtgagccagattggcaggaagagaaggcagagctgactccatactgttattccttagccaatcaccagagtgacaaaccttgagtgagcttgaaccacagatgcccactagatgttcatccctgtgttaaaaaaagatttggtgaaaatagtggctggtcctgagcccagcaaggatggagatgaagaatgataagttattcatttctaaaaattttataaatataggacttgcttaacactgactgctgaccttgaattcccttcttctgagtatgtctgcaattctaaaagcagccccagaaggctggaaaacgactcacaaagtggctattaataaacagtggtacatataaaagtgacagaagtccaaagtgtgtagacaggtgttttacttcaatagagtaatgaaatgctgaagcaatgcaggtgttcagcagccacagctttgtctgaacactgcagggtatgtgtgtgtatgtgcctgtgagtacacacacacccgtgtatgcatgcaacttaagcacacacactttggggaagcacttactatgtgcactctgcagtaacaaatcatgatttgcttccaatcattgctatattgatttaagagagaatgtgctcttaataagcattatccaccgcagaatgcacatagtaagtgctttccattccaatgttccttggtttcagcaatgtcaatgactgtactgtattagtctgttctcacactgctaataaagacataccaaagagtgggtaatttgtaaaggaaagaggtttaattgattcacagttccatatggttggggaggcctcacaatcatggtggaaggcgaatgaaaagcaaagtcatgtcttacatggtagcaggcaagagaaagcttgtgcagaggagctctcctttataaaaccatcagatatcatgagacttatttactaccacaagaagagtatggaagaaactgcccccatgattcaattatctctacctggccccacccttgacatgtggggattattaagttcaaggtgagatttgggtggggacacagcaaaactgtatcacttaacaagaaacttaacaaagtaatgttggacctaaatattttagttttttccagtatgattttatttatttatttatttatttatttatttatttatttattttgagacagagtcttgctctgtcatccaggctggagtgcagtggcagtatctcagctcactgcaacctctgcctccctgtttcaagcaattctcatgcctcagcctctagagtagctgggattacaggcattaccttgggattaccaccacaccttgctaatttttgtatttttagtagtttagggtttcgtcatgttggccaggctggtctcaaactcctggccccaagtgatccccccgcctcagcctcccaaagtgctgggattacaggtgtgagccaccatacctagctaccagtatgattttaatgagattaaggctggttggtctcatgggagaagaaaacattcaggtctcctatttagattgagtgcatctcaaaatacaggaaaaataatacaaactcagtctatttcctaagtcaagttggtcaataacatgttcatacatagaaagtgatttttcaatatttaaaaaccagttacctggatttcacatgaccagaagtgaatagaattagaacatcaaatactttgacataatgcaaacactactagtcgggatgaactcatgagttctctttttttatcccagcttcatttctggatttaccatcttgccttccattttatttttcatttcttttatctccatctttatcctcccttctcctggccaccacctcctctcttattttatggaataaattgtaatgtgaagagcatcttcaagaaattatatcttatggcctttcttaaggtaattcaaacttgtgcttggccgaaaaagaactgtatgctaaatttatgtatgttcgcagagacagagagaaactattttttctctgtccccttcatgagacatttaaacaagtgagtaacaggtgctgcatgcctggaacacactgtactctgaatattcttgtaaggagttgtgcactctggggagagcatttcatatccaagtcctcatgaacaacacctgtgcttggtcagtcaccggaaggatacacccttggtgataaaaagggattttattgggctatggatagaattgtttcgttaaatacttgggaaggaagctgataaattaagtctaccaagttggataataactgcatgccctttgggataagctattttatctgtgctttgaatggaagaaataatgcaagattgaaccaccaaactagtgtattattttaatttgaaaaaaaaaatttactttttctaataagaaatataaaactttattgtgccaaagtggcaatactcaagtaggaaaagaaaaaaaagagatataaagaaggaacgattggttagttggattgagaggctaatctccatgtcttttgcattaacctcagaattagcaggtatagctcatggactcagcttaataaagacgatttatacagtgctatggataagagaagagctctagaaacaatatttgtaagccataaattactaatacatatgtacttatgatgaataattatttttcaatatgatgagcatgatctgcctttgaagagaaaaataaagtctaggtttctgaaggagaattaactccattaggcccttagggtatacgtactttaagtcacttcactgcctagagttttaagtatcctaatggctagaaattatgcatttgtccatacagagtatcctgataactcccccaggcagacctgaactataatttaagccaattcttgataacttttataagcatggcaagatgctcttcttttctccactcccatccactcccacctcagtgtgtgtgaatcaatcactatccagctccaacatcaccatactgctgcttatcaattacaagtcaagttattttacaaaagtgataagtatcctgaattccatctgtgatttagtgttctagttgaaatattttatgtttgccttccagatgtttttttttcttgagacagggtctcaatgactcttgtttcccaggctggagtgcagtggcacaatcatagctcactgcagcctcaacctcctgtactcaaatgatcctcctgccccaggctcccaagtagcaaatgtcaccatgcctagctaatttttaaatattttgtagaaacaggatcacactgtgctatatatcttggtctaaaactcctagccttaagcaatcctcctgtctcggcctcccaaagcattagggttacaggcatgagccactgcatttggcttctgctaggttttaattattctgaatgtccatagtatacattttaagttgttaatcattggagaaaacaagatggtgtgggggaagtttgtcctagtgacaacaggtcaatatacaaggccagaagttgttgagatctaaaaacagaacactctaggcctgaccccaagaatatttcagttcatattttcagtgtatttccagaagtctagaggaaattttcacttgcctgtttcctcacatcttacactaacttacactaacttcatctccctctcaacttggagctgtttccctgtttatgacgttctgttagggatattcttatccttctagttttcagggcaagaaattaggaatatgggtatcatctttgtcttcacttcttactgtcattctctatgtctcagcttccattaaggtttgcattctttcctttcaaagatcatctgggatttgccccttctctgtgtgtgtggagttagcttaccagctccactgggctttcaatgtccaccagctgtccacctccatcccacagcacatactctcttcctgtgttgggcctccccttactatcattacactttgtgaagtcttgtcctgactctgaagattgctttatcctctcctccttgcctgatatgtcctaccggtttgccagattggacaatttccttttgaaatcgatctctttcctactcaacctagacatcgtggttcaattacatgaatgcacttccatcagcaccctcaacttctcctctatttcatctttctttagccattatctactcccagccatgacaatggtaatatccaatcaaaaacaaatacacccattctttttatttgtaaccatcctttttctttactatttgtccttggtgcagaacgttagaattctgtaaaggtgctgaatggtaccaccacaagtctatcccaaaccaactggtccctcaataccactagataattctttctcctgtgtataattttggcccttttatatttcctgtgtttactgttcagatttttttttattctgctcattttgccttcctaactccatctctctaagcccgaccagtcaactctgcctgattcctcaaacaagggaaggaccactgggaccctctctccctggcatgctggcctctgcttacggaatccattcttacccatcttctctcctgttttagagcaaggtatccctggggcttctctctaagatgtctgtgatggttagttttgtgcatcaacttgactaggtcaaggggtgctcaaacgttatttctgggtgtgtctgaaagggaatttccaggtgatattggcatttgaatcagtggcttcagtaaatatcacccttcccaatatatgtgggcatcatccaatccattgagggcctgaatagcataaaaggggaaagaaggggcaatttgtcgctttttgcttctggcctgcctgcttgagctgggacaccatggactgagatttacaccaccggctcccctgaatctcaggccttcagactcagacggaaattagccactggctttcccggggattcagcttgcagttggcagatcatgggacttctcagccttcataattgagtgagccaattcctcataacagatctcttcctatacacatccttttggttctgcttctctgaggaaccctgactgatataacatccttcccccatactctaggaccttgatcaccacttaggtcccctttttgtaaatattccacatttcgtttttcttctgaaaccctcctccagagttatactgatatgcccgagtcttcctcaccctcaaaaatatgttattttatccctacatcctatttaagcaacttattaattcctctgtcagggggtgaggggaggttaaaaaaaaagaaaaaaagaacacacttactggctgtatattctcgagtttcaaacagtccttcacttattacaatctagtgttctttctcttcaccctaagaagactgttctccctttagccacaaatgacattctcatcaccaaatcttttgcttttggtcacattgcttaatttccctacagtatttgatgcttgatattatttcttgtaggaattctgtggtactaatgtcacgagattcttgggcatcacttcaccagccgggaacttctgtggccagtggcacctttgcccaagttttgcttgggcctgctgggcttgctccacccacttggcctggcaggctgcactcagctcacactaccagcctggatcccatgcctgccaaggatgagccaggcacagagcggtgaggggtgcatgagcaagcgtggggtccgggcactgcgcacaagtcaggaatgctggctgtggctgggcacgcagctcccggtgccagcacgggtgccggctccctgcaaggttgcggcttgaccaggtgtattgcaagcagcttccatagctggcaccggggacagtggtggtacccagaagcttggagatggcaggaaccgcggagccccaaagagggtgtcacagccctggcctggggacgtcctaggtctgggctccctgaaggactgcaagtcttctctccttctctcttctcttcttcttgtcacctgctacatgatgagcaagggacatgtttcagtcctgtttgtgttacagctcttttagcccctctgttcggtggttcctgagttctcgtcctgtgtccaggaagaatgaggtatgtagacaaatgaagggtgagcaaggcaaagaagagttttattgagcaacagaatagctcagaggagacccacagtgggcagctcctgtggtgtttagctcctctccgcagacagggtgtcctgacaagtgtcgagctctcagtagataggagaccttagggtgggtaattcctctctgcagttggtggtcccatcaactctccgagtctggctgagtgggtgggtcggggtggaggcggttacgggcttcagagggaggaagtgcatgctgatcagtccatgggcagccgtagatgggcccagacaaagcaccataggttaccacttcctctgtgggacaggcagtcctgcccccaggcttcaggccttccttgcttgaaggtggggtttcacgggggacctgcccctttctgcccaggagcctgtctgcctccggctgctgttcatggtgcccaggctgttcgtgctgaggggagcctgcaggccagtgacgagctaccctcagcatcacctcagcctccctcctgtgctcatcggggcccgaagtctgggggggcctgaggcagcagggggctggcgtgtcagcattgcctctaaagagcacacacccagccgggttgtgacagtgcccagggttggcctcaactttgctctgagatcggagtcggcgctgggagcaaggaaaggccaggcagcgggagcacacacttccgagcctgcaggagcaggggaccttcccgggcctgagagtgcagagatgccaaggtccacagccacagcttgggcagcttcagctgcaccctgtagggtggggctcctgcctgctcccggcccctaagagtacagggaggcctgggtctgcagctgcgcccaaggagtgcgaagcttccaccctgtcaactgagaagggggtggggcttctgtcccggctcccaccggctacacgcagcacagagccctagccacgcctccccgagtgcagctggagtcatggcagcagctgctctagacgggccaccgctgccatcactaatctcttctagtttctatttgcttttccgcctttcaatgggctcacctattgcattgtgtgggtgttccctcagtatataaaggtacgatccttgatcttcatttcttttcttttacagcagccgtacatgatcccatttttatcaacagctttatcttatattatgagctatatttccacgtgcagatgacttctcaatctgtatgtccagtcatctcccgttgtcatttccttcagtccattctgacctttatcttttattaataaaaagaatgcactgcttcctatctctacctcatttaaacacccctgatgtttgtaggatacaggtcaaactgtttagtgtggtgtaaagtccaccagcatctggattctcatcttctactattcatagctgcatgtactctcctccaatcatattggaattcttatgataatcttttcttctgcaatatttgtgtaccgttagcctctcccctccaccccagctcaaactctgaaaaaagtttcatgaccatggattgtataatacagatattgaaaatactaatatcagtctattttgtaatcaccttgttggtgccttgaggcaaagccacacttttctccctgaaaaagaaaaaaatgtgatcattgtcaaacatcttgggaattttttcaatatgggacaagcaataaggtatgtgtttgatctggggattggagaaacatcttacttcctcacgaccagggacttccaggcatggtattaatctagaattctaggttgagtgtccacaatacaaattctgatgtgagaggatttgcatgtaagtggtttatggagaggaaataggaaagggtacaggagaagcaggttacatgaggggaaaaaagccaagaaagggtgtaatttcaggtaaagtcccagcctggctctaccctctggggaagtctagagtgtatattccacctcagacattgccctgccttgaggcaaatgggcttgaattgcatctgcttgcagcagcagttagtcattggctacaggctgggaaaggtggataggaatgaggatttgtaaactccagatacttccagctttgcttctggcactcaagagcaggccactgaaaaactgcaggtgcaagcagttagtagatcacagagctgggaatggcataaaaaactggcaacagagatgtgaaggaacaccaatggtatccaatacacctggttacggagaagcgggctaggaggcagtataatcacagaccttgacctttttactgccagctgcagtcatagcaagaacagtagaacacagaagagacagctttttgagcaatcatctcggggcagtaatggagtcctttgtcctcaagtggccatgcctagccccgctaccaagtgatgagacataccaggacttggacttctgggccccaactagaggaatcaccagtggttatgggcagcccactgtgctcaacagagaagagactttctgagggttattagtagtagagcaaaagcctggggacaaaataagcaggccggagagggatgcccagacagagtaatttcaaaatgcatgcagaattatattgcagaaaacttagaagtaactaggaagtggaagagactcttacagggagagaagtcagtagaatctctgaaatcagttaaagtttgggctacactccttttaagtactggtgagagacttgaattatcagtctctaaacccccaatggctgtgtattatccaagcatgatccaaggaatgcaacaacaacacctatcttctccttgggctttcggacccacgaacaatgtcccaacttgaatgaacacttttctaatttttcctagactcagtttctccctcctctgtccttaaaaagcactcagcaacttttattacagaatttgctacattgtactacggtggtcaatttagatgtttgtctatcccaaaaaactccttcaggaaagaagctactactcacctctctttctcagtattaaacatactatttggattataatacagtcttcataaacactagttgagtgaagaaagcacatggaaccatgattttcatccttttgggaaggaaaagatatctcagaatgtgatgtgaactatgaaacttcttccagaaaaatgcacaaacagaatcttatatacattaatatggaagaatttctcaaaacagtgaaaaaagaaagtgatccaggtggctactagcataaagcaagtctttcaaactcaagactaatggtagagatcttccaaaatatttgaaatcctggtatgttctaactcttacagtatactaatgagaaacattttaggagctcgcttccagattacatgcaccagctactttggaggaagttcataagaattgcaattagtgagaagcgaagcactgatgggaaccaagcaagaaaacagaagagtaatgaaatgaagagagctttaatgaacaagaaaaacaggcaggagcaggcaagtcaggccctgaaaatgaatggtgggagaggcactgttttccctcagattaatgtcacactcaaggctgccttatttgactactgaatgagtcatgtctaaggtatttcagccagatagaagcaaaacctcctccttcatagattctatcttttccaagagtcccagggagcctcacattcccattccattcctctagtcttaaaacatttttactttccagctgttggctactcagccagtgataatgacatcatttatttaagtaaaggaaacaacttccagtgttcatattcaatgtgataatattaccattttagagattttagtgtttggttgtgtttccacctttgatgaaagtgtaatgaaatactttgtatatgttaagtttcaatgagtaattattgatgagcagactgttgattgagacagatttaatgaaaggggagtcaatttataaactgtacttataattttgaaatattttcaaacttattatctcttttacttttctgagcaaggtacatacacaaaatatttcactatgcaatttaagatagaccctaagctaaacatgtgaggaagaattaggtaacattcaggtagattcaaatttctagaagcaattatttaaaagtaaaatgaaaataaatataatctacctaataataatcacacttctcctggctacagaaactcattccttcttttgcaccatggccatacaatttttaaatgcgtagaaagagctggaggtaaataaattcaggtgtaaaatcatatatatttgaaagtttccttaaacttatctatagagataaattgcattgaagctgatgtattactttcaaggttctcttttcatatacatatttgtttaaagtatattaaaattttaaacttctgattatggttaagtttccttgattcaaaggctcaaatgtttctgacattgggttgcatcttacaatctaggtggacacttaatgtaacaagttcttaaactgatggttcactgtgtaactgatgtacttttagaataaagaaaatgtgctaacataaaattctatttactcttccaaaaacattactcagagatgaggactttccattgttattctacagcttctaagttctctatccattttcttcatttttatccttcagaagttaatttatttagggaacaatgaggcaaagtttttgagaatggtgaaagaataagataaatttggttttccaatcctgctggggagatccatgtactctcagtgaattaatgacaggagatgtttccttgttactaatttagaagtcagccttagtaaaccttcataccttgcaatggtcatccacaaagtctggttgaagcattcaaacatggatgatatcaagacaagagagcttcattttagcacctggctgccccttttccccaaatataaatctatttgtgttagaattggccaaaggctttgtctcattaaattgtattcaaccaaaagtattttattagtgataaaaaataaatgttatgtcaaagttacttagaaggtgatgggggaatgaaagtcatttcacaaaacaatatgaaaaatgaaaaagctctctttgatcatagttcataattgaaggttatttccatttcctaggtagttattttggcaattaaatctactcaaaagttttatctctaaaaaattaattgtatgttgaaaatgtgaattgggataatgtactttacaaaggttaaaagaggttattccaaacgttatttcagtaacattagatttgctatcagatgctgaaaagtttaagatattaaaaagtataagatgctaaaactgttctctgtatggaaaaagtatgatttaattttattagtcagaattgtttagcatgcatgttaccttagtgtttgtaaggtggtaacagtctatactaccatgtagcgtgttgtttataaatcttccttgatttaatgactagactataaatttcttcagcatactatcaaatttcttatttttaaacagctttattgaagtataactgacatacaattgactgaatatttttaaaatatacaatttgcttaagttactcccaaactcactgatgatctgttcattttttctttttttctgtatgtttgtgtgttgcattttgaatagtttctattgtgatatctccaagtttactagccttttcttctgcaggatctgatctactataaatcctatccagtgtattttcatcttacacattgtagttttccagtgtagagacgtgattttcaaatcgtagaggtgcaggaacatctccagaccagcggtctccaaccttttaagcaccaggcactggttttgtggaagacaatttttcctcggacggggggtgggggagatggtttcaggatggttgaagtgcattatatttatggtgctatttatttctgttattattacattgtaatatataacaaaataattatacaactcatcataatgtagaataagctcagtgggagccctgagcttactgtcctgcaactagacagtcccatctagggttggtgggagacagtgatagatcatcagacattagagtctcaaaaggagcacgcaacctagatcccttgcatgtgcagttcacaatagggtttgtgctccagtgagaatctaatggtaccgctggtgtgacaggaagtggagctcaggtggtaatgtgagcagtggggagtggatgaaaatacagatgaagcttcactggcttgcctacagctcacatcctgctgtgtggcctggttcctaacaggccactgtaccaagtctatggcccaggagttggggactcctgctctagacattcaacttagatatttttaaatatcttctatgtctccacttagtattttgcacatatggaacacagtcacatatgttttaatacccttttctgctaattctaatacctgtatcagttctgggtcagtttcaattgagtgactgaacttcactattggttgtattttcccatttcttgcatgttggtaatctttggttgtatgtcagatactgtgaattttaccttgttccatgcttgttatgtgtaagcatatatatatatatatatatatatatatatatatatatacacacacacacacatatatacataatttacatattatgtatatatttatctttttttggaaagacactcctggacagcatttagtgagaggctaccatgtacaaatactttacatatattgagattaactttatgtttacaacaacctcatcaaataggtatcattatacttacttcaaggataaagaaacagagcatcaaagaggctaagtaacttgcctgaggtcacacagcaggtaagtggcaaagatgggatttgaacccaggtgatttgcactcctacaaatattcttgaattttgatctgggggcatagaaaatttcttggaagcagtttgtcattttcaggtcttgcttttaagaattgttaggaggcaccagaatagtgcttactaggactgatcaagatccttttgagttttctaccttgttatggtagaattatgcgattttcccagtttgacaagaagaagcaccattccaggccctgtgtgaattccagacactgttcccttaatcttcttagatggttctttcttacccttcagtcatttccttacatgtatgtgctgatcagtactatgttgaatgctacttgagaggaactcttggcagatttttgtttttttaactctgggcatccccctcctctccaatactctttgtctagtgatctctgattgctttggtctccccagactctcaactctgtctctgcaactcagggagtttgctgggctcttcttgggtaccccctgtctatcctacagcctggaaactcttaatcactttaaaatcacttccttcattgcccgatgtccagtttcttgaaagccattgtttaaattgttttgttttgttgttttaggcaggagggtgatttcagtccttgtgattccatcttagccagaaatggaaatctacacttcaatatcattcaaatgtttgtgtatatgtatatgtgtgtgtctgtgtgtatatatgtatataaaccctgtgtgtgtgtgtgtgtgtgtgtgtgtgtgtgtgtgtgtgtgtgtgtggggtgttctcactgctcactctctgtactaagcccctatcccagcatggtccgtgaaaaaaaaaaattgatgtattgttttgataagaacaattttagtaattatgaaatttattcagtttctttcctgtcttcttgattctctttttgctcaattctctcttacttgaaggtgctgagtctcctttataataaacagcagaagaatttattgaaccttgcccactgtaggacatgattttatgggttatcaatagacgttttctaagaacatgaggactgctactagaaggaaaaaaaacattattggaaatacattgggaaacatttcagtcattttaaaaactgagtctttatgcaaatcatttctctgtgccacatacaaaagatacccttaatttggtgcttgttcttggaaatcactgttaaaggatacaaaaagtattttttctcaagagtggttaggtgtggcttctagggtttgataatgaaagcagaactattcatgcataatagaatcagtgcataagagaatcatgacttttttttttaagcctgtcttactttgctattctggacaggtgtttccatagtgcaattttagctacaaaaatggttcataattgccaacacctaatttaacattctgaagctaatcataaaacaacctcccctttcacaggagagacaaagtctcagctgggctttaaatcctgattatatgacaaggttccaattgaaattttagccatcaaccaagtgaccttcaatgaccacaagctgggaagcttggtagctaatctaaacagatctctaggcaaaacccccaacccagtgtggatttccagacccttgcattattcacctcatgaaaaaagacaagcagaatatgaaaagcaaatgattgtagcaaccttccaccctcaattcctgaaaggccaacggcaagctgtgaaaatattcccatgaccctacttcctgtgtgagggcttaggacactgataaaatgtttatattgtcagcccgcatataacagtaatgctgtctgcctttaagaaagtgttattttgaaggaatgttgctcacactaaaataaaagaagttggctgggcgtggtggctcacacctgttatcccagcgcattgggaggccaaggagggtggatcacctgaggttggaagttcaagaccagcctgaccaacatggagaaaccccatctctactaaaaaaatacaaaattagccgggcgtggtggcatatgcttgtaatcccagctactcgtgaggctgaggcaggagaatcgcttgaacccggaaggcagaggttctggtgagctgagatctcgccattgcactccagcctgggcaacaagagtgaaactctgtctcaaaaaaatgaaaaaataaataaataaataaataaataaataaataaataaataaataaattaaataaattctacacgtctaactacttgcagatcgcaataatatcatgcttagtatttttacttctcataattgtttttagcagataactcaatttgaaggaagtttaactattaatgtttttgtgtaaactttttcttttctttgtaacaaaattcttccaaacaagattttcttttatctttacaagacattttttacaacttcaattttttaaaaaatatcctggcatagtggcttaggatgttggcagacaggaaatacttcattcctgctttaagcgagattggtaaacaccttggctcttaattgctaaaccatagattcatcttgggtgatccatttttaatccatgtttttattcttcacagtgatcagcatactgctttacacaaagctggcactatgaaacatttgttgaatgctggactttactaaaatgatgaatgaaggaattgattttcactatggctattgtggttctgccttaaggatttttttccttgatttataactttatgtctagaaaattttgccaaagacatatgattacatcacattgaattatacatttaacaagatgtttatcctatattaaattcaataatattttatgaaacaaaactgaaaatataatttaaaaatctatattaagtagagcaatatatttttatatttgacttgggtgtactcatcctctttccaatacagattttagctggcttgcagaaaaagatctacacactaacagtatcagaataagttagaggaaagaaagtggagaagaaagaagaagaattaagcatgccaactgcagaggccagtccagtgtgtatgattgcacattaaaactggctgtatgttttggcattcaaagttaagcgcgcgcacacacacacacacacacacacacacacacatacacaatgggttacataactaatagaaaagaagaaaatgtactgctttctcaaggcacattattttcctagtaataaactcagaccaagttctcttgtgggtcttaggcggggaacattgagtaatgtaatgggcaatgtccttatgcccatttcagagcaaatgaagaaatgggcctcatgtggctctttcttgtaaaggccttcaataaaagtcaaaaccataatattaaaatattagggagaaaaacagttctgggaggagcccagagaatttgatgccagcatgtgttcaattctgatccaagggtaaacttagaatgcctggaggtatgaaatgctgagactggttcttggtttatacttcctacttgttaggagcaggattacagcaaattgctcaaggcaaccctcaggtgacaaccttggctgaggttttatgtttatgatgaagacagattagtaagatttagaatccacatgaattggtaaaaggccaatctataattagaaaattcagaacactaaccagtgttgtgagctgaattttctcatgccacagatggtggaatgagaggttgctatctaatacggctaagctcctcaaatattttcatcgagtttctcctaatggcaaagtcaagttaaacttttactatcaggatttggggtcaattcccaaagatctgttccatagattgacaatttctttaaatctccacttgcgattccaaaatgtacacatctcaataaaatatatttgttttaatatagagatagtatttttaataaactctaagaagatgaaccttgtttattgattagctttgaatgctgcttagcccacttctcccaaaggtatgtctaatctattttaagtagaacagttataaaactgccaggggtgattttaacctgaaaagttgtcaacattgttaccactacagctctaagcaaacccaattaatgttctcatggaaagctgaattctgagtcgtatggttgcccagtgtttcctaggaattatcagtaaagtgtcatttaattgatgtgctatagaaaggttaggttttaactgaggtccaaggggagttggtgggttcgtgggtagctggaaaaacacttgaggaatcacagacagtttcaacatggctttactctttctctgggcctgagtgagtctgggcatgagcaagtgtgagcctgggcatgagcaagctgtatgtatggcattagcaggttataccttttatagacaataatggctccgagtcaagcaccagctcatgtgggtgatcacctaatgagcctcacatgacatggtaacctaatgtgcagggttgtgcgcctgtgctccaaacttgctgagtcatgttggactggatgtctgcctcagcctattcttaaccacagcacatctattttcctttacacaaaacttacgtgatgttcacagctgaatagccatcaagggaaatagcttcactattttcaggcacaatactgaattcctcttcctaataataggtaaaatactcagactttggtcttttgaggtcaaaataatataaaactcgcaccgtgaattttgacactcaaaactaataaaacaataattagcatttacatagctttgggtagatgtaggttttacacatatcaactgattaatcctcacatccacctatgaggtggttactatctttatactcattttataaaggggtagaatttgaggcacagagaacataagtaacttgcccttggcacaggctagaaagtgaatgagcgggaatttgaaccaggcaggttgactccagaatctttaacaacagtgctaagcttacttgagattgttctcttcagaatcttatggttctgtatacttgagttacttcaagtctacatgtggcctagatctatcactggaaatggatccaggccaaagaagtcccaggtgtaggctatagagacgcagcaccctcatgctccctcagcattctgctttgctctctatttcattgtctttctctgcttatttgcagttcccatgacaactttacctcagacatttcccattatgccctctgattcatctcctgtgtgtccattacaccctttgtgctttaactcccactttaacggactcaatccatcactgattcttagtgcatattctgagaagaaatctcttggtccatcttctttttgtttaacctcaggccataccataactttctagccagctttgcgtttggtgccctgatctggtctgatcagcagtggctgtgagaactagtatctagtatgtggaaaataggaggtgggtgaggtgttttccctcagaaaagaatgtacatgtgtgaaaggctgtctcagacttggccgtctcagacttggcctgtccagtgcagagttcaagatgatgttctattgttcttttgcacttccttgaagaaatttgcttgttcaattaccatttgtctttccttcatcaactatatcttggcaagccgctattaatttatttgtattataaagattgattaaatggtttccattgggcatccatggcttgtccaggaccccaatgttcgtaatcagtataaaaatgacctctggattgcagtaaatgaacacttcaatgtatttttaaatgtttggaatgctagcattagtctgtgtgagttttcatgatggcacagttcctgcatactcagtgtctccaatttacaaaaaacaaaacaaaacaaaaacacaaacaaaacaaaacaaaaaacctcaaactccctttctttgttgtgcaaactttccccacttcccagaaagctacagttttgcattcttcctctctggttacattctgagttcacaaggagcatccctatactattattgtagactgtcttttatttatgttctgtgtcaccccatcaccccatcaccagcacatggcttctctgcccacctccactattattgttcatttcaaatgcctgatgtcctcttagagttttgctatctgtttcctgtccactttggtatgtgctaatttggtatagaaattactttatatttgtagatggagaaattagttataaggatgagatgagtgattttgtgtaatatctatcagaaaaatcttctttgctttggaagcaatgtattttttacagttactttgctttcatttttgatgaaatttttgttataaacaatgaaaaaacaagactaaaggtgcatgcttaaatctgaaactgtttttcagaggataatgttcaattctactttttataaaatcaaaacctcatgataagaggattatcttttatttaaaaaattctttttgactacttaattgagaggcaaatgctgcttcttttctaaactgatggcagattttcagcaagagaagtgtttatctagctaatatatagagagtaaaataatgtgtggaaatattgtatttttttagaaaaagctactcattttccttgcaaaatttcttcaagagtgatctttgtcttgtcattttagacaacttttgataatgttaataattttaagttatgcaattttgaataaatagcaaactgtaaaaacaataactataatgatacattgggggtattttctttattaatcaccttatattgctgtcttgctggaacatttataaaccatttttatattctcaagatttcaacagccttagtattttgtaaagcatcacagttgtgcctttacatatatataaaactagttccttatatgactacatataattatacagctacatataattttttataactaattatgttataactaatatccacatcttccctttatttggtgctaaaagtttttttgttgttttatttgcatgtttttagtttagtatttatgagcttatgtaacttatccactatttgctaaaattttgcaactttgaaggcctgactgatactttatgtaggcatggaaatatctcatatttaaaatcaaaaccatattggaaattctggcatgtataataattttaacagtgtattaaaaattaagagttaaaaaatacatttattacctttgaagtgagatgctataagtgaaaccacacacatcacagcattagtttatcctagggtgaccttattttaattattttcggaatatgaattaagtcattataggtaatcttttaaagagtgaggctaggaaagatggaaaacacttttattgtcttagagtaaagggctgtggtcatttggaaacacatcattaaagacttaatcccagcacatatgggaaaggcaattccacagacctttccagaagaaatacagaagacataaggttaggaatgaggagagaaagaggtttaaagcaaggaacatctgggattgctaagaacaatcagaagccataacataaagaagacaaaaggtgaatgcgcttccctcctcctcatagccaactggctcaacagactttaaatattgagcacacattgtttcaaaggctgcttttttctctctctgacctcagccactaggaagctacagtttaacctttttgggaaatccctaatacttcaggggtgggatatatttgagaaatgtacaacgtaggagtcttaaccttttacttactggaatctcaatatctcaatgcccaagacaacttatagttcactagaattacacatatactatcatactatttttttatttaactacaaaaatttagtgatttcgcattaaacaaaagcattagtcactttgaactactgaattaatggtaaaaacaaacgcatacctaaatgtttttcaatattaagagtgaaaactttttttttttaacctataaagagaaaatacttgttttctttgagggaaaaacccccattcttattttaacaaaaagtcatgggaactaaacatatgagaatagcttttaaaataattcataggcttatttttaatacggttttagattttcaaaataattgagcagatagtacataggattccatatactcttcccatccacaagagtttcccctattattaacatcttgcattagtctagtacatttgttacaattaataaatgaatagtgatacattattaactgtagttcacagtttatataaaggttcacactttttattgtacagttctacgattttaataaatgtataatgatatgtattaaccattatcattttatattgaataatttcaccaccttaaaaatcctctgtgatccacctgttcatcccttccttccctccctccccttgagcccctaacaaccactaatctttcactgtctctacagttttgccttttccagaatgtcatatccttggaatcatatagtacgtggccttttcgactggcttctttcacttaatgccatgcatgtaacagtaccctatacctttttgtgacttaattgttcatttgtttttgtcactggatgattttttaaatagagaaaattttcataacctaatatagcattgaaaaataaggatatttaaaagcatatctttaaacagaataacagacatcggagactacaaaaggtaggagggtgggaaagaagtgaagtttgaaaaattacttattgggtacagtgttcacttcttgggtgagggatgcactaaaagctcacacttcaccactatgcaatatacacatgtaagaaatctgcactttagcccctaaatatatttccaaaaaagtgtaaaaaagttgcttatttcagatggacaaatagtttttgaagatcacgaggctcagcaaaattcattttagtctacaaaatgtactagactcatttacattttcgcagtacccctaacacccctctaagtcatactcaattcttttcattacccatctgtaatatttggtccatctgctagtagtattcaatagactagtgtactaccattaacccgagttgaccgaaaatcaatatgccatgtatcccaaaggtcatatgagtagatcctcctctttcctgtccctccaagtttctctctcgtcttccctgcacacccctgacctaaatatgaatgatttatttgagaaaatttttttggggggatagataacccatgaaattgtgggatgtttatactggctattttctcagcatttcatcttacctgaagttgataattcattgtttctagagttctccacaaatacaactttccattgacatgaaaaacacatgaaaccaaccaaaaggaactataaaatgtgaatttttactttggaagtgatgtctcctgtttatatcctttccagtatgtactcagacatggttactcaaatgagcattgttttttaagataaatgtacttacaaaaaatgactctgacctataataaaaatgtttaaaaaataatctgttttccatgtgcttaggatcgaagccacctacagtaatagcttttgttttcattaacaggggcgagttagttttgcaagtatttcttgagcatgtgttagagaactcattggaatgacctaagcaagactgccttataactataaaaaactgaaatatatttagtatagtagaaaataattgaatagcataactaaaaggtcatctttcttctatataatttgcttgaacagaaagacatcttgtaaaatggcttacatccagtatttttggtctgcttcctttttctaggaaccatattgattgcagttttagaaataaagctatttaaacaaaatcaattaaaatgatattgggaaggtcatacacatatttataaatatcaaatgatctgttaattaaaaatcacaagacattagtagcattgaagctgaaatttccatggcaatagtaaaaacatttaacagtacacatttcatttactttgcaaaagagatggatccagtgaaatagactgatgacctaatatgaggtgaatttaagtcatatgtttgagccaacaaatccagaagaggtgtcagtaagattggcagggaaaatacagacttgaaatcacagaataatagatattactgaggaaaaatacaggtaacactaaataatctacttctatgcactttttataagtttgcaaatttccaccatgctgcataagcaagcatctattacttttacaaatataaaattgcttccatagtatcacatttttaccatttctttgggttgattgctaggaatgtggcattgtctttctcatctttgccattattttagcaagaaaattcccctgggcaccccaaggcattttaaagtctttctcacccccttccctttgtaattctttcatatgcattataagaagtaaaataatagtttttgtctgatttattcttttatgctcacttttgattatgctggaccttaaaatttttatctttccactccatacaattgccaactctgcttgtattcgggtttcatctgactgtaattcattgacagccatgtatacacataattcaatgtatgcgtgtctataacacattttctgaatattgtttgttataatagtaataataatgaatatcaacaaattgctgatgtttttgttgtggaaaaattataaatgcgaagatacataagttgtttggtaccataggcccttaggagtcatatgagttattaatggagatgatatgacaataaataaaattataacaaacaacatgaggctatgagtaatcagtgcttagaaagtggtgcagacccgggtgcagtggttcacgcctgtattcccagcactttgggaggccaaggtgggtggatcacctggattcaggagttcgagaccagcctggccaacatggtgaaaacctgtctctactaaaaataacaaaaattttccgggcgtgatggcacatgcctgtagtcccagctgtttgggaggttgaggcaggagaattgctttaacttgggaggtggagattgcactgagctgagatcacgccactgcactccagactgggcaacagagtgagacttcgtctccaaaaaagaaagagagaaagaaagaaagaaagagagagagagaaagaaagaaagaaagagagagagagaaagaaagaaagaaagaaggaaggaaggaaggaaggaaggaaggaaggaaggaaagaaagaaagaaagaaagaaagaaagaaagaaagaaagaaagaaagaaagaaagaaagagaaaagcaaagcaaagcaaagaaaagaaaagaaaagaaaagagaagaggtgcaggccacaaaatttgaggaaggcagagaagggggtggtcattttgtactggatgatcagaataagtcctgacaaaggagatggggtttgtctaggccctgaaaaatagggagagatgagatttaaatatcaggaaagaatgaagaaagggagttcccagcaatgagagcaggatgaactaaggtagagagagggtttgaaagttcaaaatgtattggaaactctgaggagacagaagtagagagtccctaaaacagcaaggaaaggtaagtttgcaaggacaggatgagaccagattttggcaggttctgtatttcaggctgaatagtcctagttatgagcgcaagatgatcattttgtgggtttttagcaggctaatggttgttctttggacagatgaatctggcagcagtatgctggctgcttttccagggaaagaatgaaggcagagaggcaacttagtggagctagggaagttggggagaaaattgtttggataggagatgagacagtgatgtctaaaaatgatacattttagtaacgttgaataccaaagcagtcggttgaaggagaaatatccatttgaaaattgtttgagggagaatttagatgtagagattattctaacagtaaagtttgactaaatttctaatgctttcttagaaggcttaaaattaagccattgaaggtaatggccattcagataacagctctgagaggataaagtatgagggacacaaagtggagagaccactgaagattgaatgttggagaacgctatctccttttggggaagaggaatcatagaaggaaattaagaagctgttagagaagcaggacaacccgaagagtgtagccttgttgaagtcaagagagagtgaagttgatcaacccagttgatacaaatgtccacctctcagtgaccaaggtagcacatttgtttagtcatgattttccacgacatatttcacacatcactaggaaatgcttcctgtaactgaatattctccttctctgccaacaagtatcaacatactccgtgaactgttgcagagtgatttataatgtgaataagacctcggaaacttgtcaagacattcaaaaccatatccacaatggcatgaaaaactctagagccacgttttcttctctttcctttgtggttaattccagaaattagctattagtcacagagaacacaataaaacatgatcagatcttcttaatccctaaatccaaaatgactaaaaatttgctgaggcaactttcttttggtctgtgcccaggtgtagaagttgctcttgctaagagggtaagaaatccattcagcacacacaaagagattgcttttggcacactagattggtgcacttgtgcacactagcacagagggaaaaggtaggaaaagaaagtagatttggattctgctgcatgggaaactaccatatgattactgggttcgagcccattcattgggcccaaattagcaaccacttgtaatcaaccatcagcctttagagtgtaatgtacaatactagccatggggcaattgcttcttggaataatgtattcatctcttgagttaaaggtaagaaggaaaaaattgctgaggttaaattattgccaccttgccttggtgacttagaatactagatgagggttgttactgggcatccctcctgctaacattgctgaatccagatgagaacttgggagacttgttacataattgaagctggcagtgcagtgatgctgggaggatcttgggcctggtccagtcctccttctgcctctggcttagctgtgcgatcctgagcaagtcactgaacctattttgtctttggctttcttcgaaaacgaagagataatatcccctttgtctattctaaaataaaacataggaaagttcttttaaaaagtagaaagaactgtggggatggacagttttaaaaagagttcctgaatttaggaaatacatattactttcttctaggtttatttcagattggtaattaagaatattttaaaaaatttttgtaagacctcttcaagcagaaatttgccatttctggaaaatgaaagtgcttccaaacttggaatcacatttttagacactgcaagctggttttgcaccaaattcccttagctttctacagggcctttcatactcttcatttttttgttgtcttttctccttctttttgcattttttcctctctctttatctgctgtagaatagtttctattttcaaacggaagagcttctttgtttttgtcaaatgatataaaaaataatctttgggataaattctgaaaagagaggtcactgtaattttatgaaaggcaggtccaacagagaccagttggggtccagtgaatatcatactggaattgcctgagatttagtttggggtctgagaataggtagaagaggaatagcaatatccaatgagaaaggatttttttcattaggtgatagttactcataatgctgctaagagatgctggaaatgttagcttggaatttagtaaataaaagatattatgaaaacttcaaaaaatgtgtataaacctgctaactacagaaggctcatcagaacagaaatttgagaactttgaaaaaaagtatagttattcctaagtagtaggagctacattcatgcagaaaaatattggtcagagagaattaaaattctgtaatgtattgaatactaagcaaaagcgaacttgagtataaaatgatcccccattttcccaagagaggattctaaaaggagatttttttatgtgtgtttgttttgttttgttggctaacttgaatatacataattttagagatgtggcttaaagatctttttatgaaatttaattacaggcagtctgacttatgatgattccacctatgacattctgacttcatgatgatgtgaaagctataggcattcaaaagaaattttacttcaaattttgaaatttcatccgcctctaccttggcaaagtactgtgtacaagagagattcaactgtttataataaaataggctttgtgtcagatgatttcgcccaattgtaggctaatataagtgttctgagcacatttaatataggttaggcaaagctatgatgttgagtgggttaggtgtgttaaattcatttttgacttaatactttcaacttacaatgggtttatcaggatatagctccatcatagggcaaggaacatctgttttggctgcacacaatttaaaaatcacatattattttaaatgatacattaatgaacatttgttgctatttttttgcttccattctgggaagcaactatatgaaacctcatcacttgcataaatactttataatgcctgcatataataaaaggtatttttttaagtatcctttagacctcagcatctttgctgtaactggaagactttttgagtcttctaaaccaaagagcttatgaccttaccttccatataagttgttggagatacagcttttttacaatttgctggaaaggtgatcactttgagtttcaccccaagccacaaatattcactgggtagttattatttggacaacttagtcatcactactttactttttaaagtgatacataaaaggtatgtttatatccaaaacttgtgattatcatggcatattccaggaataattattaagtataaataagtttatttacttgcctcttttaaaaaatttaatcacataagtgtttgaggttaatggatctttcccaaatataaatttattgttaaaattctagggtactacttaacatcaaaattctttcagatgactttcttatttctaagccataatttaaaaaaattaatcttatatttaaacatatatggtatttgtgttttcttaatttttgggcctatggaaagtgatatggtttggctctgtgtcctcatccaaatctcatctcgagttgtaatccccacgtattaagggaagaacctggtaagaggtgattggatcatgagggcagtacctccctgctgttctcacgatagtgagggactgctcatgagatattatggttttaaaagtgtcagtttcccctccacgctctctctctcctgctgccttgtaaagagggtgcttgcttctccttcaccttccacaatgattgtaactttcctgaggcctccccagccatgtggaactgtgagtcaattaaacctcttttatttatgaattacccagtctcaggtagtatctttatagcaatgtgaatggcctaatacagatagtaacataataaggataacatttttgaaataccttctgaagtaatattctcctcctggtagccacatttatgccctgtggcccttcagctatactgcaatagagaagggaaggatgaatacccagaaatgaagaagaatgagcatggagaaactcctaccagctgggagaggcagtggaaagatcccctggctccagaagataaaggggagggtgagagccagagaaaggtaactgcaggagtaagacatgtgggctttcttgcttcctccctttggttcaaatccaaagacctgagggcatagaaatactcatataggctttggggaatcctagacatgtcgtggaaaaaatggcaattctcttagagaagctgtcttttgagggctactttcaacaagacaccaagcagtaggttagaaaaagccaagaaagatgaccttcaaaaaagcttccctgagctctgtgcacttcaggtgagagtgagataaagcaactgagaattccacatggaagtaaggaagagctgagtgaatcagagaacctggagtcaggacaagaatactgtggcatatagtgaccttcacatagttcaacagcaagtgccagtatcatgccccaagatctaatgaacacagccatctagtctcattgttgccagctgcccagggaaaagaatacacaacacatggcaaccatctgaagcaaaaacacttggggaagaggacatatacctacagtcccacccctcccctataaaccttaggaatccccgttcacttagatgccagcttggcaaggaagggaagtacacatctgttgacagtaatgaaatatccttgataaggatttaaattttggatgtgctgaatatttctttacccaacaaaaacacttttaatttctttattgaaaacaataacagaaaaaagttactcattattggcaagttttaatattttccccctatctgtgggaatgggatcttctgatcagcatgtcatttttttagaaatagaaaaagcatgtttgtattttacatatccaacttacaggattttaaaacttcatcacaatttatgtaatgaagtattagtcaggatagtttggttatgttgcagtaacaaatgcccccaaaccttgttcccttaaaacaacaaaagttaattaatttctcactcatgctatgtgcatgagagttgaggggctacaattcatcatagtgacttagacagagatcttggttgatggagtctcacaaagttgctgataaataaccatgacaggagaaaaagagaacatagcaagactcacactggctcttaaacttttgctttgatgtgagatgtattctttctgctcaaatgttacttgctaaagcaagtcacatggtcatatctaatatcaaccgggtgtagaagtacaatattgccataagcccatgagtaggaacagaaatcactggtgaacagtgctaatggctaccatcacttgtaaaccctttgtcactttatggattattgtttcaatgtgaaaattttatgacataactagatatgagaaatagaaaagatatcagcgacttcgatttcaatgtaattaatgtgttgtttataatttgtgcctttgtgttcttacatgccttaatacagtggcatctatagtaatcagcgttcagttgaatcgagagtgttcattctatatcaagagctgacaaactttttgtgtaaaaggtcagataataaatattttaggctttgtgggcatatagtctctgttgtagcttgtcaattctgttgttttagtgcgaaagcatggatagctaatgtgcaaatgtatcaaagtgatgtcttccaatacaactttatttatggacactgaaatgtgaatctcatgtaatttttacatgtcacagaatattcttcttctttccttttttttttttttttttttttgagacagagtctcactctgtcgcccaggctagagtgtcgtggcacaatctcggctcactgcaacctctgcctcccgggttcatgccattccactgcctcagcctccagagtagctgggattacaggtgcctgccaccacgcctggctaatttttttgtatttttagtagagacagggtttctcagtgttagctaggatggtcttgatctcttgacctcatgatctgcccgtctcggcctcccaaagtgctgggattacaggcgtgagccaccacgcccggcccttttcattcttttctaatcagttaaaaatgtagttggtcacagtggcttacacctgtaatcccagcactttgggaggctgaggtgggtggatcatgaagtcaggagttcgagaccagcctggccaacatggtgaaatcctgtctctactaaaaatataaaaattagctgggtgtggtgatgcacaactgtaatcccagctactcaggaggctgaggcaggagaattgctttaacccgggagaaggaggttgcagtgagctgagatcacgccactgcactccatcctgggtgacagagcaagactccgtctcaaaaaaaaaaaaaaatgtaaaaaccattttgtaagctatacaaaaacaggcagtgagctagctttggcctatgggccatagttttagattatttaaataacaagaaattttaagtattcaaaaccaacaaatttattggaagaaatggaagaacagttctattcttaatactcaggaacaaatagtagctcccagaaacactctgcctttgccttcagcaggtaaacaaccaccacagatgcaggaatctgacagattatgaatctgctgctaatactgctgacttcagtcccaggctactctgccatgatccagaaatatgccaagtctgctccaggaagctgctgaatcaggaatccacctaccacattgggcagtcactgctagctgccacctcggccttgatcctcgccagcaaaatatatgcctcaaacttggcttttttcgtctgtttgattcagattctaaacattcttgcaggagtatgaaggaacgtaaatcatgttctagcctccaatgtgtctgagaaatgtagtttaactttccagctgcttcatgttaccggtaggttagaatggatgttgtataaagcaatttagggtattggacacagcataataacgaaaagacaggttccattaagacaaattctttggtgtttccaaaccttccgtgagctatcaggaagagaaagtcctcgtataagtgccacaaaatgatatacaaataaaaataattgtatgcatgcttcctttccatccatgccactaccccaaaacaattttttattttaaccctctgccctgtgagcttcctacagtggcataaagatttgcataatcatgtttataacagcactgttagaaatagcaacaaaaagtgcttgagaaagggtaaaaatgttagtatatcctgctatgtagcaattaaaagatatggatgtagatactgacatggaaagagatctaagacacattttaaacacaagttaaagagtagcttatgaagtctgatctcactttttaaaagaaaggtaattttggctgggcgccgtggctcacgcctgtaatcccaaaactctgggaggccgaggtgggcggatcacgaggtcaggagatcgagaccattctggccaacatggtgaaatctggtctctactaaaatacaaaaaaattagccgggcatggtggcacgcgcctgtagtcccagctactcaggaggctgagacaggggaatcgcttgaacccaggaggcggaggttgcagtgagccaagatcacgccactgcactccagcctgggcaacaagagtgaaacgttgtctcaaaaaaaaaaaaggtaattttttaaatgcgttatcttgacggcttctttcagattttaaatgtagtccaaagagataaataatctattttatagatgcatacaaaatacaaagttctctataatcctaatctcccacaataactgcagttaatatttttctgtatgtatgcatacttttttctgtagatataaaatctttaggtcacacttttaaatgaatttagctttgtttaaaagtcacatttttatttttaggaataagatcttgttatatcagtgccgtagtactcaagggtgtgtcgcactctgaatttgtttatttttcctctgaaaaaatcactgggggccactgatttcttcacaggtatggtttcttttctttcctttcgtttttttttttttttttttaattatactttaagttctaggctacatgtgcacaacgtataggtttgttacataggtatacatgtgccatggtggtttgctgcacccattaactcatcatttacattatgtattactcctaatgctgtccctcccccaggcccccagcccccgacaggccctggtgtgtgatgttccctgccctgtttccatgtgttctcattgttcaattcccacctatgagggagaacatgcagtgtttggttttctgtccttgtgatggtttgctgagaatgatggtttccagctttatccatgtccctgcaaaggacacaggtatggtttctatatatgatatggtttggctctgtgtccccacccaaatctcatcttgtagctcccataattcccatgtgttatgggagggacccataggagatgattgaatcatggtggcaggtctttcccatgctgttctcgtgatagtgaacaggtttcacgagatctgatggtttttaagtttctctacacaagctctcactttgcctgctgccatccatgtaagatgtgacttgctcctcctttgccttctgccataattgtgaggcctccctagccatgtggaactgtaaatccaataagcctctttcttttgtcaattgcccaatctcgggtatgtctttatcagcagcatgaaaacgaactaatacaacatgctaacatatacaactaatttgtttaataaatatgggttcagttttatacatctttaactagcatctcatttcaaagtctgttgtttttccataagtgctatttgcagtgcaaatatgtcatttagtcaacccaggacaggcaaggtacttgcaagcattaaacaaaaaactgatatcatatctctgagacatattacattgcatcatgctctctttctggaacatttttctaaaatcacaaatttttaggcatctagaccaaatacttcatttttatattgctatacaaagagaatataggagctatttcatcatatttaatattttaataagagcatctccaacatggtttcacaccatgcatgcatataggtccaccattgttctccatgaaatatgctataaaacttaaaataaatttatcagttatgctactacaacacattcattttctacttgagcaaaatatacatagatgaataagctgtttctagaactgactgcgaaaacaaaagattcaatagcaatgaagtctagaggtaataaggcatgtatagtaattagttgtagttagacctcactgattctgaataagtagaagaaaaaagaaatggaaaatggaaaaagggtaacccagagaatgaattaaagcatggttttcaaaccacggtcttgggactcctttatacaattacaaattattgagaactcccaagtaggcttgctagataaaatattggatgactaggtaaatttgaatttcaaataaacagtgaattaaaaacacaagtatgtcccaagtattacatgggactcatgtatactaataagtattcatatttatttgaaatgtaagtttattctgtgtcttgtatttttatttggtaaatctgacaaatcttatttcattttttatgctagatatatctgttagtattttacatattataaattaaaacaaaaaaaaatttgtattcattgagttaagataacaatagacctattacataagtaacaacttcatgaaaaatattcatttttcctaaaacaacaaacaaattggcattgtacatttttgccaatctctttaatgtctagcttaataacagacaggtagattctcctacctgcgtttgccctgcgagtactgcattatgttgctttggtaaaagtacatgaaaaaaatatggcctcacagataaatactttagaaaagggaagagtatcttaatgctttttcagaagattgtggatattattctttgatgctacactcaaaattaacaactgatagtttgttttcttttcttttcttttctttttttttctttttttttttttttttgagacagtctcactgtgttgcccaggctagagtgcagtggcatgatctcagctcactgcaaccaccgcctccagggttcaagcgattctcctgcctcagcctcctgagtcactgggactacaggcacacaccaccacacccagctaattttttttttttgtatttttactggaagtgggcttttgccatgttggactggctagtctcaaactcctgaactcaagtgatctgcctgcctcagcctcccaaagtgctgggatacaggcatgagccaccacacccagccaataactaatagttccttaaaggttagttgcaataaaacgtatgaaatcatggcagtgaatttttcatacttggtcatactaaaatctgtttgtctgtcttatgctttgaatgatcttttattcctgccttatttttaaaacatctgaaatcatggcagtgagtttttcatacttgctagtactaaaatctctctgtcttatgctttcaatggatcttttattcctgccttaattttataacatcatggacattggccatttgaaaaacaactggtttattgatttatgtagttctttcaatgatctttacacagtattgaaaaaatcacatttgttaatatcaccactaatttcataagaggagtctgtttaagtattaagaagatgtcaagctcgaggaggtggatagaagtttcccaaaatactaatttctgcttgaaagttaaaattttatcattggcaataaatcctaacaattgttttgcttgaagtaaataaccggctcattttgattatttttaaataacatttctgctaaatatgcaagtctcaataaccatagacattttcacaagtagagatggtgttccatagcaaaaaaaagtggctcattcagcttgtaacacaaatgacattttcctcatgagaactgtcatacactggcaaacatactttacatgtatttcccatgtaagtacattttcatcacacaaaatttttaaagtgtattcacaggtaaaggtttaatgaaaataatgcttaattaaagagattcttatgtgaagtcagctttttaattttcttttccctatgaggctgcggcagtgaagactacaatgactgctgttacagtccggtgccgctacctccattcatacgaaggtaacagcgtgattgcttttccaccgtcagttccaatgtcaacacagtagaaagacaaatggcttcataatattattatgaaaacagtgtttagtttgtggatccttgggaaagtcttggaaatccctccaagtctgcaactccagcgtggagaactgctactttaaaaatacaaaacaattttgttgttttcaaaaacactttaaagagcaggtagataaaataaaaaatatcaatatttctatgtatgtaataactaatggactagatctaaaaatgttcttaaatgtttatcacccagctgttttctccttttcacaagattcccttatttagcacctctttgggttgtggtgtcaccttctcatttgctcttctcttgcacatcagtaactctgtccattgtcatctatgtacaaaatgaaatcaacatacatgagtgcaaggagagctcacaactgcttgggtagatcttggtttgtttagggtcttggtttgtttaaggttatacacaatttaatgctattcgtgccccaatgccatagtgatactgctctagccaacattccagattcataaggcttatcattacgatgtttaaagcttaggatgtagtctcattgtccggataaggctcaaattccttaacaaagtgtgcagagtgcctcacaccttggtcccaatccaacctttcctttatttttcttgtcaacagtacaagggcacgcacgcacacacacacaattcagctccacaacttgctattccctaaacatacattatgctgcaagtcctctgtcccaaatgtgtttcctccaaattctcatttacttggcaaatttctccccaaacagatctttcctcataactcatcttctcaaggaaatcttccatgaacatcttacaaaaaatgtcactcatttcaacatttcattctcttcacctctgctttattttattccttttatttttagttgatacataataattatacatgttttgggggaatacagagtgatatcttgatatgtgtgtacagtatgcaatgatcaaatcagggtaataagcatatccatcaattcaaatatttaccatttctttgcattgtgaacattcaaaatcctctcttctagattttcgagaatatacaataaattatggttaaccatattcaccctacaaggctgcggaacaccagaactcattactcacatctagatgtaattttgtacccattaattgttttctcctcgccctaccctctcccctcttcttttcagcctctaatactcgcaattctattttccacttctgtgggctcaaattgtctttcatagcttccacatatgagtgagaacatgtggtatttatctttctgtgcctatcttattttgtttagattagtgccctccagactcacccacattggcactaatgatagaattgcattcttttttgtggttgaataatattctattgtgtatatataccacaatttctttattcattcatctgttggtggacatttaattccatattttccatattttagctattgtgaatagtgctgcaataaacatgtgggtgcacgcatccctttgatatacttatttccttttcttggataagtaaccagtaatgggattgctggatcataaggtaggtctgttttcggctttttgagaaatctccacactgttttctatcatggctgtacaaagttagattcccactaataatatatgagtcccagcatttgttatttcttgtttttgtgataatatccactctgacttgggtgaaatgatatctcattttggttttgatttgcttttccccaatgattagtgatgttgaactttttttttcatatatttgttggctaagtgtatatcttcttttgagaaatgtctattgagattctttcccccctttaatcagattatgtatttattttgctgttgagatgtttgagtttcttgtataatctgggtattagttctttgttggataaatagtttgcaaatattttctacaggttgtctcttcactctgtcgattgtttcctttactatgcagaagcttttcagtttagtatagccccatttgtctattgttacttgtgttgcctgtgcttttgatatctttgccataaaatatttgcctagacctgtgttctgaagcatttctctcgtgtttttgtctagtggttttatagttcgaggtctttaagtttttaattcatttttgtttacagtgatctctattttatcttttattctcacttcttatatatcatatattatttatcttgattaatttcttgcccactagaggatatgtattatgggggcagagatttttgcttgcattttgcccacaatggtaccttctgtacttactggtgttttcttggtatttgtaggtactcggtaaatatttgctgagtgggccaagtgtggtggcacacacctgtaatctcagcacttagagaggctgaggcaggaagattgagagcccaagagctctagaccagcatgggcaacatagtaagacctcgtctctacaaaaaataatttttaaaaaattatatgcttgtggtggcacatatctgtagtcccagctattcaggaggctgaggtgggagggtccttgaacccaggaggtcaaaactacagtgagttgagattgtgctactgcactccagcccggatgacagagcaagaccttgcctccaatatattcatttgttgaatgaataaaggatgtcatatagcacctctattagcttccttcacctcagaaagtcaaatttaggcacatttttctttcttctctattccacactacatacagcagtataccatttgccactttttttttaaattttaactcttaaaaagtagaatttctagcagactccacacactttaacatatgtgatttgttttattcctcctcagctgttgttgcagtggctgacactaggtaggtattttataaacatctgtcgaaaactgagtgaaatactgtgaggcagttaaaaccaaaagtgtagaataatttggagcttgcacaaaataagatgccttatacaactggttaagtaaaataataatattgaatggccttctcaacatggtgcagaactattgttcccagaaataaatagaatatgtaatgcccctttctaagttccaacatgattaatattaaactaggctgccatgaaccaaaatttttccagagttgctctcttccaacgtctcctgtagtttagccatcctccgtcttactacctcccttactacgcccatgagagaagatcggatctcaatcagttgtccttttgctttatagtgctatttttattctttaaactttaactcatttatagagtagctttttctccttaaagtaatttcagacaccagccaccaagggggtatttgtcagatcttcccttaaccaatgaagtcatgctatatgaatgctgttcttgagggtgagtctgatttattcaattcattagtcatgagaaaatgcttatatcttctaatatcatgatccacattctatttaataaatagaattgataattttacctaaaggagttacaaaaaaaaaaaaaaaacattaaatgtccagatatctagttactacaagccctccagaatgtagagaaactattctaggagtgagagggagcaggaaaggtcaggggacagaaggagcagctgcatgagctgtttgaggacccagtgggttcttggagtctgagaaaggactggagaggtgaaagggtactggcaagagtcagagaccatcagcctggggccagagaggtcagatctctgaacaacatgtgtctgtgagagagtgtctacctacagtgacgactgaactaaatggtttcctctccaccttgatcctgattacagaagtagaagaactaactgtggaaaggaggaaagtgaaaatttaaggtttgactgtatgaaattaatagtcatttatgtaaatgctgtgtagtttgttgttttttcatttgacaataacaatgtgcatatgattaaatgtgctttgttgactattgtaagttttaatttgataaaaattgctcatgcttgcagagtctgctcttaacaaacatcatgttgtctctataattttaaagaatagatgaattgtcacaaaaatatttcatacttagtcatttactcccagatgaaagttggatgctttatggaaaatgttacagtaaaagagggtatttatgtttcagatagtctttttgtattttgtttgcatttaatgatgcctgttaaagtattcctgggtgacctttatgatcttgctgttcagttttaggtttcagtgattgaagtccttgaaaatatgtacctaagtctatgcaattttcaacacatcttctgtagagtcaaaatatggcctataatatgacttttgttatccactgcataaatctgaaattgaaggtaggaggtttcaactttcaaaaatttttcatctaccctggcttctgtaactttcatcattggaaatgtgtggtataaactgtcaattccgcagtcactactaaactggcatggtttgtaataatactatttaaggtgctcatcaagggagtaaatgtagcctgttttgaattaggaaatgttagaaaagaaggtgttaacattttcagagatcagccttcaactttgaaaatactcttggcaaaatactgactgagttcattggtccattaagctgtatctttctgtctgaatcagctttccatttgaatattgacaaaaaggatgaccttgtgttctgaccttttaaccccacgaagctaatcctgcttttattccaaaagggaggatgggacagtggatgtcctaatgctcccattgtattccaaatttataaacaggtcctttgccgttttaataaaaattattaacacaataacaacttagaattccacatgtcctaatttgcagttccaccatatttagcatgaaatgttgtgctgcacaatatgttattaaaatcaattgtcatagaagtaaaagatgcacatgaacatcattgcccatcaaatcaataagcaataaaatgaaacgggtatatagggcattgccctttactgaatcaaacaagctggattttcccccaacagccctgtgagactattgaactcagtcataaactaatcagggattttaccagtggtttcagaataaaaaggaaaaatactctccttcatccctgacaacctaacctttggtgctgatcagttgaaataagacataatgctcaagaaaagatgtatctggagggtcatctcatgtggaggctgaaggtcatttccaacaaagcaatcaaatatctaataaaacctcaagatcacatctttggcatataggcaagcagaataaactagataagagtgaaaaaacttagaatcctgtatctgtggtaagagatggttctctaagcatcaatgtggagattggcaaatattcattaaacctgacattgcttaatataactaataaaaaattaatacattgagatcacatcaatttatgaaatgaggaaaaacagttgtttttttaactcatcattgaaaaagtacacttttataaaaatactatgaacttcttttaatattttgattaatttgaatttctgattggccccacaaagattaactctactgtaattttagaataaaccagtctctttttattggacaagtcatcaccatttatcggagaacatgaaaataggtaaaatgaattttaatttattcaagtcagcatgaaaaataaaattaaaaataaaaataaatttgctttcaaaaacgtcttacattgtttttaggtttgggtattggtaagtgcaaatctattgttcacatgtgttggcaatttaaagatctgatttaaaatagtttagaaaaaatcaaagaaaaaccctgaataaaagatggtttaaaatatttgttttatatatatactcatataaataaactcatttttttcttcatcagtcactgaatttgtgaatcatattacatagactggccttaaagttgcagacaaacatactgatggcagcagcaggctgtctggagcagccgctaccaccatgcctgctgcagtgaagaggtgcaagcatagggggtgggatcggctgtggggggaccactgtgccctgcgtcccctgtgccctgcatccccaaggcagccaactgggctgcccccaccttcgtgtggccaggcgggacccacctccaggcccagagcctcagttcctccagaccctggcccagcattgccaatctcacctgctgccactgcagggagggtgtcggaagaggtggacagttcctggaacccactgccctgggggccatcacaatggggctgggtcgagttgcccaccagctgtgaagcagcaggttggacagagaggggccctgaggtgaagctgggcacaggacagtgccctgcttgcacaaagagtgtgggttctctgggctgtatatgccctgcttgggggacctggccagtggtgcagtcactgtgcccattccaagggttctgggtttctccatctcaggagcaggctctgtgcagggccacctggggccatgtccccagggtccacctggcattggggtgatcttcaggcctgatactcctgatgtccaggcctgaggcctgcaatccactcttggaggtgccccatggcagggctgcgagccaggcaggaccagagcctcactgcagtctgaactcctgggggcctgggaaggtcccctgctacccccacaggcttgggtgtttctgctccctctgcctggctctccccattcctggcacctgcaccaaacttggattaaagttggggccaaggccgggtgttgtcacagcctggccaggtgtgcacacactcagggcagcactgacatgccaggtccctgccatcttagactccctccatattttgagcactgatgagtgcaggggaggcagggcaagccaatggggaactaagggcagctcagcactggccttcaggcaccccagggtgtgagcagtgtgggtgccatggatgggggcaggagctagacaggctcctgggcagaagagggtaggtccctagtgaagccccaccttcaggccaggtagggcttgaagtctggggcctgggctgttagccctgtggaacaaagtgggaactcacggtgcctttactaggcctgcgtctggcctcccatggaccagttggcatgcacttcctcccctctgaggcccataaaagccccaggctcagccagagctgagtggagggtggagagaggacaggacaacaagctgcagagaggagctaccctctctgctgagagctgcagagatgactggacgacttgcctgcagaggtgagccacccactctagggcctcctctctgcaaagaactgcagatgatgggatgatcagctgcagagaggagctatcctctctgctgagaactgagcacttgtttgggtgatctgcctgcagagaggagctaccctgtctgctatgagctgaacacttgttggggacaccctggctataaaaaggagctgcccattgcaggtctcctctgagctgttctgttgctcagtaaagctcctctttgtcttgctcaccctccacttgtctgtgtacctcattcttcctggttacaggacaagaactcaggaacttccaaatggaagactaacagagctgtaacacaaacagagctaaacatgccccttgctcaccatgctgcagaagaagagaaggagagaagagctgcagtccttcagggagcccagacctgggagatccctgagccaaggctgtgactccctctttggggctttgtagttccgggtgcctccaagcttctgggtgccactgcattccctggggccagattgggaagctgcttgtggtgcacctggtccagccacagcctcatagagagctggcttctatgctgagacctggatctgccaaccccacagcagcagcatgtctgctgcacagtggccagaccccatgttcacacacacacccagtgctgctccatgcctgactccagtctcccttggaggtgtgggatccaaactgatagcatgaactgagtgcagcctgctagggtgagtggatggaactagtccagccagcctgagcaaaactggggcaaaggtgccatcggccacaggtttctggctagaaaagagacaccccaaagattccataacaatgtcactataaaacaaacaactcaaccttacattaaattcttccttaactcctccataacatccacttttcctctgtcaaattaaagttctggaaacttttttatggcaaaccatgattgatgaagctcctgtctcccaaattttcatggtgataatttatatttattaatatatgttatttgtagactctccctgagatttatgtcttcaccttcttctacatttcactgagacatctgcttaaataagtctttggagccctttgtttattgttagatatttttagagaccacattaacgtattaagactaataaaattatttttactaaacactgcctaaaagccccaaaccatgtaattccatctgaaagagaataaaaatcacttttgcattacacaagtcacaacttacttgattgcctattgccactttaaagctgattaacttgttcatttttattctggaattttctagatggtagataaatggcatggatttttaagtgtccttcactctatttcagagtcactatttggtacaatccttgaaagagagcatttttatattggcaattatccccatatatcattgaacttaatctttgggaattgaaactcaatcattttttcatatgactattaattgtatttgttcaagatactgtaatttaagaagagtgaaattttgtgaaacatgataatttctacttaaaatacattcattattcagctaataatgaaaaaacaggagtgtttgctcttcttgctaacattttgagaattctattcacatatcccactagtaatgtacctttgttattataaactatgattactgaaggacttgagtttgaagcagcacactgacaaagggaatggcaattgtttttgcatgtgctctgtgtttgatttggatcccaatcacttgaagcatgggcttgtgttatgaacacaagcagattcagtattcaacatcctaatgcagtaaaaacaaaatcacattcatgtaaagtggagatgtttcaagaagtatgtgatctcttatgtggcagtttgaaatcttggccatgatattcagggctccctttagaacagagtagtagacagatcatctctctgtagaattcattattacgaaatggaacattatttgttggggagtgatactaagtcctgatcttgaataaaaactgaagcaatttcgttggcacaatatggattttccatgagtctgttttttagataatgcattctgcaggatcaagatgagactgcattaggtacttcatgtaaagcaagaaaaatttgtgttttactatatttccaaacatactaatatttggaataggaatatagctcttgggaaaaatagttctggttatttaatatacgaagtttgaaaatcaatagaaagtaaaccaagtcatgtgttgtaaaatgtattaaaattattttttctatattttaatccaaaagcaatggttttctttgttaaacaaaaatatggacaacacagaaaaggaccaggtataaagtaaaatttaaacatactctgacacagaaagagcactactataaagttatgatattgttttatagtattttttcttctgtctatagtacacacatatatacattaataatttatggatttggggggacactgtaaataatggatattttgaattatttggattcatttgccatttattcccttcctaatgagtctgaatttcctatttcaatatcaccttatcattgtgtattgtcttggtggaatcctaaattaagaagccttttccatccccaaccaaggaactgacaactgacccaagacagagcaattaagtctctcccaagattgtggatcttgagtgaagtgacagaaagatgggtgggatggaggtggaggatacaaaacatggggggctcatttgtctccacagataagatggaaaacatggttgagtagttttctgctctatttcctgatttatgtcttaccctgcttcttggatttctttgtctatattctcttgcctacttgagccaaagctgggttttgtgcttacaaccaaaaaactctaccttatacattcagcacacatttttttaaacttgcttatttcacatctatatgttttgactctagcatatacatatatttttgccacaataaattgtactacagtgcacatctttagatataaatattcacatacaacactgatgatttctataggttaaatttctagaaatagaattactaatcatagtatgctcattttttaagtctttttatttatattgaccagttgtaccaaaaaattgttatgccaatcatgagaacgtcaacctctctatattctttccaaaatttttaccttattgccaatttgataagaaaaatactttatatcttaaattttcattcttaattgttagtaagttgaaaacattcttttttcagtcataaagtgtcttctatgaattattttctgtaaatatttttacctatttttttactgctcaatgtgtttccattttatttatttgtaagagctctttatatgttaaagacattaaattttagataaaatatatttcaaatatttttataatttgtcattcaacttaatatgttaagtatttttggcatataagaacttaatttaataatcaaactttttaatcacttccttttatgtttcttatcataactgatggtcattgaaaagcctccctaccaaaactgcatagatattcatatttatgaaattgaaacaatgtttgctcattttaaaattaattttaccttacttgacaattattttaaaatatcacatgaggtggcaatttcatgttattctttataactgcttaattagatatcccaatatgtatctattgattacatgtaaataataagttttgaataattattcctttctaatttatttaaaatgtcctctttatcatatagtgctttactatacaaaatatgtcccagagagcaagaccattagaatcacttaggagtttattagaagtgtagagtgttagacttcatccagctctactgaatctggatttaaactatatatgaataattgcaggtacattgtttaagagcagtggtttaattctcatgtattcctaagttatttacaagccaattaattttcttttagtgttcctcattatttttaatttgtaagaagtggctgtttttcttgtttattctttgtgatatattcctaacacactgaaaacattttgtttcaattagaaatagatctcaatttacagggtcatttcaaggtctattgagatgattatatcatttttatttgatgcatagacatgacatagagcactaatacatttttataaattaaaccaatggtgcctttaaaggataaaatctattcggtcataatttttgttttataaaatcttctagagtttctagtgttttctttaagtttaaaaaccctttcttcacacaagtaggactggtctgtagatctttcgttgcattatgtgcacatttgtgtgtgtttgtgtgcatgtacgtgtgcgtgtcattgccagatttcattgtcagggttacacaggcttgataataggaattgtgacatttttcatctttcactatgttttctccagcattttattgaaaaaaatttaaccatgtacaaaagtagaaggaattgtataggaatactcatatacccactacctagattctacaattaacatttcttctagttgtgttatcagttgtttgtgcatatatctatccttttatgcatactgtgtgtatcttatgcatttcaaaataagttgcacatattcagtacactttcccactaaccaggtcagcacatattttactaaataaagtttaatatttgtctactgcttttcctactgagcaacatttatatacgatgtaatgcatatctctcaattgttccattcaatgagttttgacaaattcataagcctgtgtaactcaatcttttgtcataatcacaactctcgtacattgttcataagagaataaaatattacaactactctaaaaaaaaaaactctctgcagttgctcatgaaactaaaccttatcacctagtagttcaactcttagttacttcccaagataaatgaaacatcaggtccacaaaaagactttacaggagagttcatgccagttttatttatattagctgaaaaccagaaatggcccatatgtccatcaacagaatagacaaactgtagaacgaaatgttactagaaattttaaaaatatgaactactgatatatacaacaagaattaatctcgaaacttttttgctaagcatgagacttatgaaagagtacatgttgtgtaattccacttatatgaaaacaagcaaaataaatctgtggtggaaaaaaatttaaaatattagttgcctcttgtgggcaggaagagaatgactaaaaagagacactagtgactagtattgatatgtgtggatttgatcctgtcattatgctgtctgctggttatgatgttggtttgtttgtgtggcagctttatagtgacactggtctgtgtgtttaagtgtgtttttgtattagctggtagcaaccttttttctatatttagtgctcctttcaagatctcttgtaaaacagatctgttggtaatagattctcttaacatttgcttatctgaaaaggatctttctccttcacttaggaagtttagtttggctaaagtgaaattattggttgaagatttttttctttaagaatgttaaatataggtccccaatatcttctggtttgtagggtttcagctgagatatctgctgttagcctgatgaagttccctttgtaggtgatgtctcctttctctctagctgcctttaacattcttttttttttcactttgaccttggaaaatatgatgattatgtttcttgagaatgatcttcttgtatagaatcgtgcaggagttctctgtatttcctgaattagactgttggcctctctagcaaggttggggacattatcatgggtgttaccctaaattatgtcttccaagttttttgctttctctccctccctttcagtgatgccaatgattcatagatttggcttctttaaataattccatacttctcagaagttttgtttcttcctttttatttttttttatctttgtctgactgtcttatttcagtgaaccagtcttcaggttctgagattatttcctcagcttggtttattctgctgttaatgcttgtgatcacattgtgaaactcttgtattgtgttattcagctgtgtgaaatccattagattcttttttctactaacttatccctcacctcatgtgttgctttattatgattcttattttccttggactgagctttgtcatcctcctgaatctcaataatctttcttcctacctatttctgtcatttcggccagtttagcctaattaagaactcttattggagaactggtgcagttgtttggaggacatatgacactctagccctttgagctgttggagttcttatgttggttctttctcatctctgcatgtgggtgttcctttaacttcagtgtagattaagtatagtaaatagacttattttctggatgttttcactgagctgaggctttgtgcagggtttttatttgaagctgacttctgtctcttgtttcagaatggagtatgttagtgaggtatttttggtgttgaagctgcggaatccagcaggtggtatttaggcttattgttcagttggtagactcttgcttgattctgtggttctcctatgtttcttcacagttgcagctgtgctccctctcagtgctctgaaagtgtgggttcttctttcccttgcgtgctggctgtagatcccagcttagcactcctaggttgaccagtgcagctctgaggcaatcacagtggttatattctttccccaatttggaggcaacagaggaaggaaccttagtagtggttgtggccaagggtcatttgcttatctcctgagggctccaccccagagagattcaggccattaattactcagtgtaatcagcccaggatggagggtctgtgctgtggtcccaagccaggggtctgctgataggcagtaggatgtgtgtgacccatgagagatggactggcctcctttccttgggtcaactgcaacttattggagatgtggataaaccacttaggttttctgcctcttcattagtgcaagggtggcaagggcagtagcagagaggctttcagttgcccctgaaggctctgtccagggagttggtgagtttgctgctggctcaatagctctggcagggggcggctggaggcctaggcctggaggacctgcgtggtgaggagatataagaacaaccacccacctaacaatctggctaattttccacagggttgctgcagtatgttgggggcccattccagtctctagtcacctcaaatttttcagtacctggcaatatcaacagtgaggcctacaaaacagcaaagatggcagcctgcccctccttctgggagcttcatcccagggacattcatccctgttgctggcttaaacacacctgtaggagggggctggagacgccagttaggagatctctcctagtaaggaggaacgggattggggacctgcttcaaaaaacagtctggccatgttttagtggagcatctgtgctgtgctgggggtccacttcaacccccagtcaccttgcacactccaaagcctgaagactggaacggctaagtcgcccaaacagcaacaatgatggcctgcccctccctctgggagctctatcccagggaggttacaaatctctgtcagctggagaacaccagcggggtggttggaggccctggttgggaggtcctgcccagtgaggagaaataggatttgggacccacttaaaggagcaatctggctatgttttcatagagcagcagtgctgtactggggtatttctgcccccagtcagctcagactctccaaaccctgaaggctggagtggctaagttgcccaaacagcaaagatggcaacctggcccaccctctggggagctccctctcagggaggtgcaaagctgctaccagtggctggctagaattgcacgccagtgggtcttatcctgtgaggtactgtcaaagtggggcctgccaggtgttcctactcaggcccctggattcagtctctttcctaggggtatgtacagaggcctcacctcccactttgctggagctgcagctacttttgccagtaaaaatgctgaaaagcaagtgattcaataaaaggacaattcatttaaagctaatgtcatagaacaatttgaatgtgaaattgaattggcaaagaaataaataagaccaagaggcaaaacgtgagttactttcctgcttctactgattcagggcttcactatggattttaaaaatattttacttaagtattgcaaattcccaagaaatgtacaccagtgctcaaaagcaagtacaagaataaaatctactctaaaatattatttattaaactgaaaatattctttccaaaatcaggattaagacatgaatgtctgctcctgtcattctattaaacgttatatttgaggttccagttaggtcaattcaacaagacaaagaaatacaaatgaagttaggcagattgaaaagaaaaaagtaaaagtacctgtatttgcagatgacatgatcttagatagataaactcctagaagtccacagaagaaaaatattagagctaataaatgaattcagcaaagttgtaggatacaagaacaatatataaacatgagttggatatttaaacactagaaattaacaacctgtaagtaaaatttgtacaagtccatttataatagcatcataaagaataaaacacatgagaatttttctgtcttttttataaaaaaattataaattcaagggagtacatatgcagttttgttacataggtatattgtctaatgttgaggtttgggcttctagtaagcttgtctcccaaatagtaaacagagtacctaataggtagctttacaactctcaacccattcctactttcccatcttttggagtctccgtctttatgaacatgtgtagtcattatttagctctcacttataagagggaagatgaggtatttgattttatgtttcagagttatttcacttaggataatgtcttcccatcccattcatgttactgggaaagacataatttcattagtttttatggctacatagtattctatggtgtatgcatattttctttatccaccataaggataaatttaaccaaagaagtgaaagatttgtacactgaaaattataaaacattgttgaaataaattaaatgtctacataaataaaaagacatcctgggtcatgggcttgaagacctaatattgttaaggcaatcacaattccaaattttttctgaagattcaacataatctcatcaatatttcaactgcttcttttctcttttcaaaaatggacgagattattctaaaatttatatggaaattcgagggaccctgaatagtcaaaacaattttgaaaacaaaaaagaaagttgggagaatcccacatctcactttcaaatcttactacaaggctacattcattaagacagtgaggtagtggcataatgacacactcacagacccatgggatagaactgagagtccaaaactaaatccgtatgtccatagtcaactgattcccacagagtaccaaggccatgcaatggaaaaacaaataatattttcaacaaatagtgctggaacaaatgaatagccacctgcagaaaaaagaaattggacccctgcttcctaccatacaaaagaattaactcaaaatggatcaaagagctaaatatatagtgttccataacactatcagaagaaaacataggtgtaaatctgcaaagtcttggactagagaatagtttcttagatatggccactaaaagcataagtaataataacaaacagtgcataaatttgactataataagtttaaaacttttgtgctttaaatgacactatcaagaaagcaaaaagacaacccacagattgggaggaaatatttgcaaattttacaactgttaagaggtctcgtatacagaatacataaagaacacttacaacccaaaaataaaaagacaagtaacctaatcaaaaaataaaggatcaaaagagacatttttagggaaaaaaaagatacaaaaacatccatgattaattattatggaaacacaaattaaacctttaatgagaaccacaccacaattatgaagatggcaataataataatttttttaagggcgagaacaggtgttagtgagaatgtggagaaagtggaatgctaatacactgctagaaagaacataaaatattgcagttactatggaagacagttttgttcatcaaaaagttaaacatagaattaccatatactccagcaattccactcctagttatataccgaaaagaaatacaaacatggtcgggccgggcgtggtggctcacgcctgtaatcgcagcactttgggaggccgaggcaggcggatcacaaggtcaggagatcgagaccatcctggctaacacagtgaaaccccgtttctactaaaaatacaaaaaattagccaggcatggtggcgggtgcctgtagtcccagctactcgggaggctgaggcaggagaatggtgtgaacccgggaggcagagcttgcagtgagccaagatcacgccactgcactccagcctgggtgacagagcaggactccgtctcaaaaaaaaaaaagaaaaaagaaaaataaaaagcactggcaaggatgtggagaaagggaaaccttgcacactattggtggaaataaaaattaatacagtcataatgaaaacaatggcgatatctcaaaaaattaaaaatagaactactgtatgatgaagcaatcccactagtgcatgtatatccaaaggaaacgaaatcagtatgctagatatctgcacacccattttcattgcaacgttatttagaatagccaagatatggaatcaacctaagtgtccatcaacagaggaatggataaagaacatgtagaacgtatggaacaccattcagcctttaaaaagaagcaaatcccgtcatttgaaacaacatgagtgaatctggagaacactatgttaagtgaaataaaccaggctcagaaagacaaatacctcatgatctcacttacatgtggaatctaaaacagttgaactcacagaagcagcgaatacaatgatggttaccagggactggaaagaaggcagttgggaaggtgttggtcaaaggatataaaatgtcaattagatagaaagagtaagttcaagatatttattgtataacatgatgacaatagttaacaacaatgtaatattttcttgaaaattgctaagagagtagattttaagtgcttttatcatgaaaaataaatatgtgaggtaatgcgtacgttaattagcttgatctagccattacacaatgtataaatatttaaaaccatcatgttgtacaagaggtatatacaatttttctttctcagttaaacattatttttaaaatggtgtgttttatgttatacaaattatagctgagttaaaaaaagaactttaaaaatcatttattttgagttatacactaattccagtaatcttttctgccactctgtatatgaatattttaaactaattgagagctaaagcacctttttatttcgaagaatggtccttcctcaaaacacactatttaaaaccaattccccatggagtgtcattcttcacttgcagagaatatctttcttagtctaaactatgtgaatacagactcaggttctcttaacctgtccaaaacatttgtaagctactaactaaaaattcagcgatacatagaattaattttctggatgatttctggtaggtacctataataatcagcagtaaactgtttctcatccatgtctgttacctaaagccctaataaaataagtgtgctatagagtgatagaattaggggaaccatctctttttttacattaaatattatgaaaaatattttatctaagaaagagtgttttaaatgattaagatgaaaaagataaatactccattagtaataatggctcaactttgctcattttaactaacagcagacagagttccctccttagagatatcaatatttgaatgctttggggcaaagggaataagataataaaatttagatccaagtcttacccaaaggcatctacctgtccaaaaaaaaaaaaaaaaaaaaacctcttgagtcccccttttcctcagaaaaaaattcctaaacctaaatgaaaccgatcactttttcagggttcccacctaaggacgtagcatgccatagtcatctctcctgtcttgttctccactatcagccatatccaatccaacactgtctagtgcattcattgcaattttattgttaggtatagtatgaataaactaacagttagtgtattccctgattggttgggtcactgtgggagacagagcccattatcgaaggatagaaactgagcaggagcaaatattttctttcctttcttccagagccatcaagtcactggctcacaaattaggctatggaacatggattccccagctaggtctttgactcttgagatgtaaagatgcaaagatgcaaaaacagtttgtgattgtccacagttgacatggtgagattgagagtccagtgtgctgttcttaccagcctattcctctggaatgactttggctgttttcttggctacctactgttcttttgttctcatgtgttttccaacatcaattttcccatttcgcatcaattctgttagtgtcctgatatctttccaataaattccttatctgctggggttggcttctgttattctcaaccaagaatcttgatcagcacaattgctaaagactttcagttttctttcctaattatcttggagactctccatgtgtctcaatcttcattactactaccatgaaagtgcaagctaaagcacctattttcattctaaggcaatggcttctgacctcttctacccatatccatgcatatcctttcagaattcatcttctacactgcagctagagggaattcttaaaaacagaaactgataatttcacttggcttaaatcctttaatggcttcttctttgatattgttttgctctgtgtccccacccaaatcttatcttgaattataattcccacctgtggagggagggctctgtaatccccatgtgtcgagggaaggaggtgattggatcatggaggtggtttcctccatgctgttctcatgatagtaagtgaggtctcatgagacctgatggttttatgtgtttgacagttcctccttcacaggatctctctcctgccaccttgtgaagcaggtgcacacttccacttccgccatgattgtaaatttcctgaggcttcctcagccatggaactgtaagtcaattaaacctctttcctttataaattacccagtcttggacatttctttatagtggtgtgaaaacggactagtacattctttttcctcaaagaccaagtccctatatgtattggtctctgcctacattttcttttttttttttttttttgaccaatttaactctgctctctgtgctctaacctcactgacttttgttaaatttttcaggtgaattatgctactatgctacctattgccacaggacaactatctgggatttatttttattcattcaacaaatataacttgagagttcccctttcccctagttaatttcaactcaaacttaaaaccaaagctcagacattcttggaatcctcagtgaaagctggatttctttgtgagaatcctttctctttcttttgacagcctatgggcatcagttgtaatcatatacttgctggtgtgattttacgagtctctgtcaccctcagtagcctgtaagctttgggtgatcaggaatcaaatctatctcttaacttcctgctctatgctgtttcccagcacagtgcctggaaattaatgaatagtctattaatagctcttaaataaaacattcatcaaataattcacagaatatgacttagatttagagggctattatacatatatttctaaagttaaatatttactgtatgatttctctttgtttttccacattgttcaactttgtggtttatcaatagatttctggaggtaaaagtttcgctctcatttgtgttctcattcatatttcctttgccacaatatttcttgcactatacttcttagaaaagcaatacttgagatcacgtatctgtattttattgaagttactcagtttaaagccagtcatcctaaatcattctaaagacttctaaactgacctctactaaggaaaagaaaatgcttattttttgaaaaatggcagccttcctattccagatttttttccaagcttaacatatagaaacattttctctccccctgaattttacttagtcataagtttttagctcaagtttcaattgtaatagctggaaaacatttaatgctaaaaaaatgaatggctgcttccaaataacacactgttctttgagaaagatcacttaaaatatcagattcatctcatctccattatcagttgttctgaaagtctcctttgagtcatttatctttgtaatcattgttttcatccatatattggcatttagacaggtattacagatagtatgtaaaaaaaatacacatgtataaaaatgcggccattatacccctactaaaatattgatcataaaggaaccaaattcaatgtgttcatttttataataactttaaagaattcatgcttaattaaaagtgatatataaatcatggtgtttgctagcactatggactgtgctgttcccattctgccaaacttaatataaaattaattgttaattttcagacccgtagtcttctcttcaccaaaaaatatgctgattgtttagacatgagtcagtgaattattaaactttataactgagggctctcttttgtgatgtcttaaagtaattctcaagatttgacactactctcaatgtctacatttgctccttctatacactgaaaaaaaatgttttgtgacacaactttctagataagtctatgcatcaagtgtatttcacagtcagttgaatggttactatttcagtaaagtgcacttagcattaagagtagcatgaccttgtagggtggcaaagaagggtttatcttttgcacaatcaaacacgacagtggactaatctaaatttttttccactttataatactcgaagacctctaggttagtctgaccttacataaacaaatatagcaattcaacagtctttcacatgcttgttctaaacaaaacttaaagccaaaatagccaccaattccagagtaactgatgattaacttagggagtacttggctctatcttcaagaaggttaacatgacctgaaatgacaaaatgattttacttacttacattgtatgcatttcatgtgttgttaggataatggttatttcactttttgaaggtcagtctgaaaaacttgaccagtaaatgtttctgtggcattgccctctttcaaccagaatctacaattgtattgaatggctttttatttctaccatgttttttggccttggtaataaaccacactgactctctcattaagtagaaatccaattcctttttttccaggtgaagggagaacatatttcccaatatttaacctcatgtatgactgtaatgagaccttatttttttcatatctctacagcatctctgcagagcattccatcctgctgaacaaggctagtgtatgtccttgcttgtgccaagctctttccagactctgtgttcctaacattcccatgacctggaatatcttctttccgtctgacatttttctttctctcccttgtctatagtgactcagcacttttaatgattttctatgtacctcattattatgatggatgaagcccatgcctgggaaacaccaccataactgcatgtaaccagcacctcttatgcttcttagaaattcagctctaaatctccccattcatctttcattcaggaaataaagttggaatgtaagtgagaattacataccgtgaatcaaatctattgttttaaatgaaataattggcaaggctttgcaaattattctagcagcgaattatctatagcccatgccacaagtgtatcatggcattgattgaaatgcacggatcaagtcaaattgaatcctgtttatttattaagactcaaatcaaatcaactataattcagactatattcattcattcactcaacagttattcattgcctggaacagaaattgcacaaggtgtcagggctataaaaacagataaagtagttattctcaaaatgagcatggggcactcctcagttttttgtgacacatatttttgcacttttgagttgagcggatacaaaatccttctgaatacagctctcaaagcaaaaactctatttattagaaatagcacagagatagatatctccactacagttaaacagatagacatgtaaattaatagtcaatcagtaaactataatttgcagagttaggtaaacaagagcaaaactttaatgcctattcattaatttaaaatgtataatttctgtagaacaccattggatcctatgtgagagtaaaaaaaataatctctgaatagaaagaacaaagaatttagaaggggagataaaatgtacacccaaataacaaaaatattaagccaatgtctttgtagatataatgtccatgcattaattccatgttattttctctaagtcattattttacctactgcactatgacttctgatctatgccttaatcttggatcttactggcaccagcaatcattccttagtttcaagaaaaagtaacttttaaaattctgcatcttacttgatcatttcatagaatttaaaattgagaatcaaggcttctctgtttccaagcacaatacttccgatttacatcttacctttctgacaattctcattcatatattttgatccttttttgtcgtctacccctgacatttggtgttcctcattgtccttcagtctcatgtctcttctcttgagatattctatctgatttattttttctaatctcaggatgcttaggattgaacaagtccactaacaccattcacttcatagtgtaaatgaattgtcttcctaaagttgtacagggcaaaatctacatggccaaacccatacataattgttctccatctatttctagtctagaaactcagttctttttccttgacttcttccccatggtttatttaatctgttccatgaattagcctcatgtataaatttacctgtacaagcaaagttacagagattcctctccacattgtgttccaaactgccgccatcatccaattcttgaagcctgatatccttactttgttcaatatttgggttattattcacacatttattttcccaaactagaagtttaggagccaactttgacttcttccattttctccacacaaattcaatcagtcagtgtgtcttgttaaatctaactctgaaatgtttttcgagtctgtcacatcttattcattctttacagttttatatatagaaaacaagtggttctcttaacttttcatcctgtccttaatgtgtctcaatgtcatgaattcttctctgcctattcactttttggtcttttctcactgtttcctgaaaacctatctttgcccctgatgttttctttatgtgagtgatgtttcttaccaaactattataaaaaaataatttccaggattcaattccaatgtgattccttttaaaacttttattcttttagtttaatcatcctccatgagatattaccctttcccttcttctgtttcctacagtattttatgtgtgcgctagcaaaacacctttgataatgatcacttcttgtaaaatgcttgtttcctttaatagactgtaaatttcttcggggaaagaaccaggagttttctttatttatgtctctttagaatatgaatacatgattaatatatagaagatacttgaaacatttggggggaattaaactgcacttctaacgttcatgttaaacaactaaacagatgttttaaatatacaacactaggtgattctcacccaaaaggcatgcatattttaatgcatgattttcagtgactctacttataaaactaatgggaaattgaccaaaagatgaaatatgtttaccagttcctgaaactcacagttattattaagctacacagtgattttaggtggtattactcactttgttcgcacatttttttttttttgagatggagttttgctcctgtcactcaggcgggagtgcaatggcatgatcttggctcgctacaaccttcgcctcctgggttcaagtgattctcctgcctcagcctcccgagtacctgggattacaggcgcccaccaccgcgcctggctgattttttgtatttttagtagagatgtgatttccccatgtttgtcaggttggtcttgaactcctgacctcaggtgatccacctgcctcggcctcccaaagtgctgggattacaggcgtgagccaccacacccagcctgtttgcaacttctaatgattaaaatgagagaaatgtagctttacttcctgaaaatttacttgcttctgtggtccactctcttccacttttattccataatcttgaaaataaactgttcaataaacactactgatgccttaaagataacttataataagtaggtaacatatatcaagtcacaattactttgactaccaacccacccttccattttgttcctgaaaataaatcaggaacaatagatgaactgtcaatcccaggtgtctctaaggcagaatatttttctcttgccagatctagagtcatccttgttcccctcattcatattgtgcttaaacttcgcaggtttcaactctatttctgctcatcacagtcttcaaattggttctctttttattctatcttcaaactacatttatatcttccacagttgtttcccttcatttgatttatgcaagaagaattcaaagagcagtggaagaaagtttgagtagagagtgcaggattagaaacaatacagaggtcatgtgggagaaacaccagacacttgatacaatgtccttttccagatgcaatgccaacacatcattatggagtcttcccagggctctcattaactacaacctctgcccatgttactcaaaatgtgattcaattcagttattcattcaacatacgataactgtgtgccttgtatatggacagtcatgttctaagcttgagggatactacagagcacaacatagttccttttcaaacaaagcctttcttgtattcctatgggagaagacaggcaataaacaaatagatacatagcacatcagtgggagaaatatggttttaggaaaaaaaaaaaacctaacatggcaataggatggggagatggaggagattgtgttattttacatagaatagtcaagtaaagcctccctttgtgggtgatatttgaacagaatatgaaggaggaaatgagccataggactatcagtgcaatgaatgaacccagcatgggaaagaatgagtgcaaacacagaacatactccaagatcaaccacatgctcagacataaaggaagaatgaatacgcttttgaaaattgaaacaatgtcaaacatacatttggaccacagtggaataaaaatagaaatgaataccaaaataatcctcaaaaccacataattgatgcataaattaaacaacttgctcttgaatgacttttaggtaaacaacaaaattaaggcagaaatgggaaaatgtataaaataaatgaaaacagacacatgatataccaaaatctctgggatagagcaaaagcagtgttaagaggaaagtttatagcactaaatacctatctcagaaagttaaaaagatttcaaactaatgatctaacatcacacctgaggaactagaaaaacaaaaacaaactaactccaaaactagcaggagaaaggaaataactaaaatcagaacaaaactgaatgaaattgagaccttgaaatccatgcaaataatcaacagaatcaaaagttggttttctgaataaacaagattgattgacatctagctagatcaatgaagaagatggttttctgaaaggataaacaagattgattgacatctagctagattaatgaagaagagagatttaaataagcacaatcagaaaaaacaaatcagataaatttctggaaacacacaaactttctttcactgctctttgaattcttcttgcatgaaatcaaacatcacaaccaatctcacagaagtactatagcattatagcatctgcaagactactgtgaacacctctgtgaaccaggaaatctagaggaaattgataaatttctggaaacacacagtctcccatgatggaatcaggaagaaattgaaaccctgaacagaccaataccaagtttcaaaattgaatcaatagtaaaaacctaccaaccaaaaaaatgtcctggaccagatggattcacagctgaattctgccacacagacaaagaagagggagtatcagtcttaccaaaactattccaaaaattgaggcagagggactcctctctaactcaatctacaaagtcagcatcaccctgacaccaaaacctggaaaagacacaacaaacaaagaaaactacaggccaatatccctgatgaacatagatgcaaaaatcctcagcaaaatactagcaaacccaatcatcaaaaagttaattcactatgatcaagtagccttcactcctgggatgcaatattggttcaacatatgcaaataaataaatgtgattcacgacagaaaaaaaattataaacaaaaactatatgattatttccatagatgtggaaaaaaactttagataaatttaacatactttcatgattaaaaaaaaaaccctcaacaaactaggcattaaaggaatagacctcaaaataataagaaccatgtatgacaaacccacagttaacatcatactgaaggggcaaaactgaaagcattcctcttgagaacaagataaggacacctaccctcactactctttttcaacatagcattagaaatcctatccaatgcaatcagacaaaagaaataaaaggcatccaaatttgaaaggaagaaaaactatctctgttcactgactatatgatacaaagccctgaagactccaccttctatgtgtagaaaaccctaaagactccactgaaaggctcctggaactgataaaggactttagtaaagtttcaggatacaaaataaatgtacaaaaattagtagcatttctatacaccaataacattcaatctgagaacaaaatcaagactgtaatcccatttacaatagctgcaaaaaagaaaaaagaaaataaaatacgtaggaatacatctaaccaaggagctgaaagatctctacaagaaaaactacaaaacaatgctgaaataaattatagataacacaaagaaatgggaaaacagtccatgctcatggactggaagaatcaatatcattaaagtggccatactacccaaagcaatctacagattcaatgctattcctatcaaactactaatgtcatttttcacagagctagaaaaaattatactaaaattcatatggaataatggaagagcttgaatagctaatgcaatcctaagcaaaaaggacaaagctggaggcatcacattacccaacttcaaactatactataaggctacagtaaccaaaagagcttagtagttgtacaaaaacagacacatagacaaaggaaacagtctagagaacccaggcataaagccacatacctacagtcatctgatttttgacaaactaagttgacaaaaataagcaatgtggaaaatactccttattcaataaatggtacaagggtagctgtctagatgtatgcaaaagaatgaaactacaccctatctttcacaatatataaaaattcactcaagatggattaaatatttaaatgttagacctcaaactataaaaatcccacaagaaatttggaaaagaatgtatgactaagtcctagaaagcaatcacaacaacaaactgaaaagtggtagctaattaaactaaagtgcttctgcacagcaaaagaaattatcaacagagtaacaggcagcctaaagaatgggagagaatatttgcaaaccatgaatctgaaaaaggtctaatatccagaatctacaaagaactttaaaaattcaacaagcaagaaacaaataatcccattaaaaaatggacaaaagacatgaacaaacacttctcaaaagaagtcgtacaggtgaccaacaaacatacaaacgctcaacatcaccaatcatcagagaaatgtgaatcacagttatgatgggatagcatctcacatcagtcagagaggctcttattaaaaagtcaaaaaacagcagggcatggtggctgacgcctgtaatcccaacactttgggaggctgaggcaggcagatcacgaggtcaggagttcaagaccagcctggccatcatagtgaaaccctgtctctactaaaaatacaaaaaattagctaggcgtggtggcagacacctgtaatcccagttacttgggaggctgaggcaggagaatcacttgaacccgagaggcggaggttgcagtaagtggagattgtgccgctgcactccagcctgggtgacagtgcaagactccgtctcaaaaaaaaaaaaaaaaagaaaaaaaactcaaaaaacaacgatgctggcagggctgccgagaaaaggaaacgcttatacactattagtgggaatgccaccaatggtgggaattggttcagccactgtggaaagctgtttggagagttctcaaagaacttaaaacaggctgggtatggttgctcacacctgtaatcccagcactttgggaggctgaggtgggtggatcacttgaggtcaggaattcgagaccagcctggccaacatggcaaaaccccctctctactaaaaatacaaaaaagtagccaggcatcatggcgcatgcctgtaataccaactactcaggaggctgaggcaggagaatcgcttgagtctcggaggcagaggttgcagtgagccaagatgatgtcactgcactccagactgggcaacagagcaagactctgtgaaaaaaaaaaaaagaacttagaactaccatttgacacagtaatcccattactgggtatatatccaaaagcaaataaattattctaccaacagatacctgcactgtctgtttatgacagcactattcacaatagcaaagtcatggaatcaacataggtgcccatcaatggtggattggatttaaaaatgttatatattttatatatatatattttagtttactattacgtagccataaaaacagaatactatgtagccataaaaataaatgaaatcatgttctctgcagcaacgtgaatgcagttggaggccgttatcataagtgaataaatgcaggaacagaacaaatacacatgttctcacttataactgggagataaactctgactacacaggaatataaaggtgggagcaatgggccgggtgtggtggctcacacctgtaacctcagcactttgggaggcagaggcaggtgaatcacttaagatcaggagttggagaccagcctgcccaatatggtgaaaccccatctctactaaaagtacaaaaattagctgggcatggtggcgtacgcctttagtcccagctactcaggaggctgagacaggagaatcacttgaacctgggaggcagacgttgcagtgagccaagattgtgccactgcaacccagcctgggtgacagagtgagactctgtctcaaaaaaaaaaaaaataaataaataaataagagaacagtggacactgagaactaccagaggtgggagagtaggaaggaagaaagagttggaaaactaactgttaggtactatgctcagtacctgggtgatgggatcagtcataccctaaacctcagcgttttgcaatatgcccatgtaacaattcttcacatgtatgcactgaatctacgtaaaataaagttgaaattatttaaaaaaagaaaagaatgactgcaaatacctgaggtcttaaagcaggagtgtgcttggcatttatatcagtctggctcccagcaaaataatttgcgtagagtctaatcaatactctatataaagaacaaagagaatataagaaagtcattgggaaaaatacagtacctagggctaataacagtaggtctccattactggttaggcccaaaagggcgaggggtgagattaattgtaggaaccggagacagagagaaatgtgtaaagagggctactttgtaggagtaaaccccttaaacaaaggatgcctgtgtcctgccagcaaagaacctgtagagagggagacagtgaatatacactctaatcttactcttgtcctccctctgatttcttgacagtgcccgctattggctgaaaacggaaggctaaggcacctgttgataaagtccacgccgttctccctctcagggcacagaaaagagaagcacggagagtggatcttcaggggaaaatggaaggtctttatcacagcaagtctgaaggacccatgaggccagagtgcccggagcctagtaggcaaacgagtgaacagcaggagatgagagcagtgaggtagaggctggatcatgtggggccttgtttccataatgtggactttgtaatttattctgagtgacataggaagtcacagggcatttttgaaccaaggggaaggcaaggatagaagcaagaagatcatttaggaactattgcagtaatcctggtgagagatgatggtgacacgggctagaaaaatagtgagcctggcagtgagaaaagcaatcatgttctggatgcatttggaaagaagagagctgtcatagtttacatatgttgactgtgagagacagaagattgtcaaggaacactggagagtttgggcaacataaacaatatagttgccatttcgccatttactgagatgggcaagacttctgaaagtgtaggtttcatatggctattaggcatctaggtagagatgtcatatgtgattttggcagaggttgggcctggaaatataactttggcatttgttagaatacagatgtcagataaagctgtgggacctgatgtgattaggcaaggatttagtgtaactaaataacattaccctaaaatggactcctgggaattctaacatttaaactttaataatgcaggaaggaagcactcagctaaaaagatcaaaaaggactagaatgtgttatagcaggattctggtgggtattgagtgtaactgagtagtgtaaattgaaaacaatttgggtcaaagaagcctgtagccataatgagaaaaatgatcagaatatgagagtattgatatttttggtgaccttgggaatatttaaaaggtacagaaatattgacgtctacattttgatggtgattaagacataatattgatcttactatttttgaaatgtatagttcctgcaacttagttgttagattattaaacagttttggcctaatttttctgtaaaaaaaaatgacatttcaaaataggttggtcaaaaacatatcttgtacataatctgaccaaaaaattagatgcagttaaatcttatttcctattcaatttacttgatattatcacatttgacactagcaaactatttggaggagagtggaaagttctagaattgcccatatgtgtcctaaaaacagggtcaaggctgcaaagatcttttctaataaataatgagcatttataagattctgctactttccagagtaggatagacagatcagtgatccccaaagatttccacattctattcccaggaacctatgaatatgttaccttacagggcaaaagagactttgctgatgtgatcaagtaatggactttgagatgaggaagactattctggattatccaggtgagctccatgtgatcacatgggtccttaaaaatcagagaactatcttggctatggtcaggaagatgaaatcttgctgattttgaagacagaggaagagggccatgagtcatggcttgtgggtggcctctacaagctggaaaatggaaggaaacagattctccaggaagaaacacagccctgctaacactatgattttacccctgtttggtctgtgtcacacgtctaatctagagaagtgcaagaaaattaatttgtggtttccatctacaacatctgtggcactgtgttacagctgcaatggaaaattaatacatagtgtcatgattttgttttagatgatcatctcagttgaatgaagaaacaaccaaaatggtgaatttgaagatttcaaatgagaagcagtttccttccctcatattgaagtgtaggtacgggtctagagtggcctggacccttccccactatacctgaatgtcctgagaaggcgatgtttgttccctcattgtagatgaagaaacagagatattaaatatatttataagatactccaaataacagaatggatccagcactgaaacccactttccaccctgcccccccgcacattgcctcaaaggctttcatatatatgaaatatatatgcttaagaaatccaagtaaatttggaagagggatgattacgcacaatttccttttggctgcctgatttccttttggccttctgcagttaagaagtccgcgcatttgcatggtcatcttaacacatgaaaggaacaaaccaatatagtctaatcatagtagcctgctgaggtcacaacaaaattgtctgacctctgagaggctctgcgttacacctaagaaaacagcaataccagtaatttgctttaaaaaaaaaaaaagagaaagatgcatttatcagccacagtgaaagataatagtcggtgccctcttcgtctttcctgtccctttaattttttgctaacaggggaggagaaataatcaagggcatcaggtgtaggttgccccttaaactaattaacagtcctttggggagtttcgctagcctccctcttttgtccagttactggcaggaaactgggtgaccaggtggttttctggtgctgtaactttgccgagggctgctggaagttgtaaaaaggctttaacttatctcttctagatccttgggttcagccggctcaacctcttaacccaggctttcttcatttccctgtcttcacatgtctatctttgataaaggagaaactggtgaaagtcagcatgtagatattacctcttgagttctaaggctcaaattcagtaagttatagagaaatctggtggtgttgcttttgtagtatgaagcctagttcatttttattaaaatataattgccttacctaggagatgcttgaggaattggaaggaccaacccagagtctatctctctttgttgttgcttactgagtgttctccttggtggaagtggcttctattccattataggcagagcactgcagggctgtttatttcctgtatctacagagtacaaaaatggttcaacgaaagaaatagttgggattgaggtatttgatggaaaggaaatgggagtatttgttcgtttgggccacgaggcaagttcaaagcgggagacttttgttttataaaatgatggtgagcagctccggttttatgtcaaacatcagggtttcgtgcaggatataaacatttcctgctggccaagtctgtttctataatggtaaccccataggttctgtgctacttgcactgtaattgtgccaagagttcctgtattcaacaggggaggttaaaagtcagtctggtttcacagctgttttgggtaagaattggctttccagcagctctggaaacttacagttatactcctcagataaacattaatcagtggctataatttcacaagggcatcgtggagttgttgggaacgaaattggaaatatgcctgtctgggtgtgtatttcatggttgtgtgtagggacgctcagggacattagttttaagaaggccattaatgagtatagataattgtagaattttatttcataatttcttcaggcacacattaaggtgaaaatgagcacaattgaaagtttaaatggtagaccttattttccccttgactttcggtaaatttaaagatggtttatcttcattttttattaatctcaatttggcactgattcccaatgcttcagctttcattttctcttttctttagtctttcaagtagttattgatttataaacaaatacttaaatgtaaggaagatgaagagattttgatttaaagcaatcctaatggtgaaaagaaaaatcattttgagctatagaggaaactccctccacagcatctctttaaccgttttgggttttcatacttcaggttgtcttaaatttggggccatctctattcctttatagttttcctaacttgtgccctaaaagataatatgagctgtctttgataaacccattttagagcttgctctgtgatctgaatcacaaagttgacattgagaattatgttcttccccttgataaaggttgctagaaatggcagaacaaacgtaagagatttttttaaagtacttgaaagacaggacatcccgtgggcttttctgactgataagacatgctgtacatatctctactcaggaggcagaggaaagctttggaaagaggatggggtatagtcatcacaaatattttaaagagactataaaaacatgctaaggacagccaaagctgtaataaaaaatagaaaacatcaacataaatgatgaaattattattacattctatcaatgtgaattatccaagtcctttgatttttctgggagactacaaatgaaaagaggtatgtgcaagaacccttccagagaaggaagtctatgtcctcttccatactatccccaaccaaaaatgaatgaggaaaaataacatgtagttatgttaaggtgtttaggtttttaacaagagagaataagattaaaagtacctatcaaagtaatcgttttcaaattgacagttgttcaacgagtactctaaagtcctgtatatgttattgcccttgatgaagatgggccttcccttggtctaataagaaaggtatactttccctgtttataaatggcattttccattcatggaagaaaaaacgttcagtcctttgtgatataagatttgtcatctgatgatatggtagcccctagctacatgtggctattagacgtttaaaatgtggctagtctgaattgagatgtgctatgaagtgtgaaatatatgtaggatttcaaatcccccacaaaaaaaatgtaaagtatctcaatcatattcttattttgattacatgttggaatgataataatttggacatatttggttaaatacatacattattcaaattaatttgttttactttctaacatttctattagaaaaaattttatattacaatttaaagttgcacaggttgcccacattatgtttctgacctagaagccagtcttagatatttgtatctctataactttaggcactgaagtcactttaaaaaaataaaggaaacaagagatttcaactctaagaaatgaaataaggaaggatagactttaacttgcatatgtggagaagaaagttcaagaaagaggaaaaaggggagcaatagaggtagggaatcaagtgactgcagaaaacaaagaggatggatcagttgatgaaacatcaatgcaaaataacaagagtaccacagtagacacacacacacacacacaccatggagctcctatcgtcttgatttgttgccctatactgcaaatctcatatatttgatttccaagtaaatttagcaaggtcgatgagtttgcaccattattgctcaggaaatttcttcctgtaagtttagatggactcactgtcatggtacgagttattattattaagtataccttcagcattttatatctactgaagtggtcattgctcatattttttgttattcttctccgttggcatcttccatgcactctgtatcagccaaatagtctaagtctgaaacatcaaaatgacttgacagatctgcaggctcatatcttgttccattctaaaccttcaaagttatatggaggaaatataataaaaattgattctgcaaagatgttcaagtcctcaaccttccttacatggtcaggataataaaaagatatataccataccaaaattaatttccactgctcccttggccttggataaatgaaaaactatagtttttagttttatggatctcctagccttcaccagcaccagtgttgaggaaattaaacaattaatctttcttttaattgtataggaatgtcagtcagtgaagtaaacacaacttattccgctcttgctcaatgaaagttatctactgtgaaggattagctgccatgttcaacaataacgaagctcttgttttccaataaagaggttaattggcttcagagaaaatacgtgtacagaacacataggcctaatattggttttgcaaaggcccagtgtgagggaagttaatgtttcctgtttattagctgttttacaacaatctgcccttgaccaataattatgcttacatagctgatgctaatatgtgtcagcgcagtagctacttaatgtatcctctgcacctgtgtgcaattgagtttgccatcaacccacagcgtccttagtcctcactctttgggtgttgtttcctgtctccaaatggactaagcacctggatggtggaaactccaatgtcaaaaatcaggctgcctttcctggacctgttttcttaaattctaaatgtagccatctgttttgcaggtctatgtggttaaaaatgagaataagaaaagtagaggatactttctaaacttaaagaatttttcaaggaaattcacacaggtgtcccatacatattcactggggagaggcctctggagttttgagagcatactgaatcactgtaggatcttgctaaattgcagatttaagcagggcctgataatctgcatctccaacaagctcccaggtaatcctgatgatgctgattcgtgagcaaatgttgagtagcaaggcacgggggctccttaggatcacagccactgtgataactacttactgatgtttactgaggtacgattaagtttttactttctgagtagcaaccacgccttctatttcctttgaaaagactcataaagcttgcctgcagtgtagctctggacaacagaaaactcctggtaacttttgtgaaagatagatcattacatggcaactcactgaaactgattttgtccatgaggatgctctaagtcacatatagcaataggcattggagagaaatttaggaaacaggacttaaagaaatatggcagtgagtgttaccaactgggacagttagactcattaactccttgatttcccacctttttccttatttaccttcatgttactccctctcctatagattatttattccagtttgctcacttcacttcattttgagagcaagctaactaggttacaagtggctgtttaaaaagcatcccatgtaataaacatggcacataaagttcactgatgtcaagaaacaagaatcaggagcagtaatgatctctgagtctttgatcgttttaaaatatagttcccctctgggttaaatattttttatggctttgggaaatattcatattaattcctaaaaaaaatgatgaccaggatgaagagcctatataaaaatagactgaaggacaatcaccaggccgattttctttcatgatacaagttttcagtgacagctctaaactagaaacttttcaattaagtccaatctgtcacggtgggggaaaccgtgtggccggcaggccttgcaaagagatttggcagtgagtggccaagttagcatttctaactgaaaatatgctgtatttgtttaaaccattgcttaaatagcactgtgtatttttattcctttgtaggcatttatgccattaatttatatggtatgcaattaggcactgcaagctcagtattggagtctctgtttttcagtctttcccccatctctaagtttgccttggtggcagtaaaacagaatgataaaataatcttttcttcccatcttgctctctctgccacatagggagaaatttttgtccttgagaatgttaagtgtccaaatcatctctgagcccagttcatggtcagcacttgaagggaacagtttgagacagcagaagcctcttaaaccatcccaccacaaatctcttacaatataaaaagacaggaaataatgcatccctccctccttcaaactgtagtgacatgatgccattattgtaacataaagtaccttctttttcaaggttgttcttaagagctgtggaattgtacgtttcaagagactgcattattaacaaggtttgtattataaaaaacatacaggtcataaattaatggcatcaatatcccctggaactagatcttagctgtgtttagatgcattcttatttatattggtctaataaccaggacctttctctgctcaccacatttcagcagtttcgattggctgtatcattagttcagtagcccctcacaaggggcacgtcaatcacctcatgttctccttcacctctccctcttctccgtctcttctgcattccctctccctcgctgttttgtgttgtgatttacttgggatcgcttgaacctttttaataaataaggttatacacaaacctaaggttgcaggtggaatctcagttccttacactctccactactcaatgtaatgtgatcagacttaggaggggagaaagcctacaaataccgatactttacggagtattctttcaactgttgaatgtcctttaatttaattcagaagtcaatccaatgcatgttttctttttttttttttttttttttttgagacggagtctcgctctgtcgcccaggctggatgttttctttccatttatgaatttccactttcaggaagagtttttaaaaagtcaacaaactcttcctgttgttcatgtgctgattatagagaatgtgtctctgttcaaggtttaaatttcctttttgagattctcagtgtgaccttcaattatttctgttggggcaatgactagaaattctttaaaataaaatagtaactggttgggccatgtggatgtactgctctgtgggacatggagtaacttacaagttaaggatatgagtaacacagaagataactctgtgttggtggtgctgaattttgttagagaacaaacctcaccgaggctgacttcagctctactataaacatgcaaagcaagaaaattgcatgtgttttggacatactttgtaaggcaccataaggtctatttcaagaaactaacataacaacgggtgatactaaatgctactgaggaacttgcaatattttgcacatatggactgactatgtggcagcatatataaatatttcgtttgctaattgcagttagttatcagattgcacatgaacagacagaatgacatatgagaagttccaagaacattgtgtaacaggacatacaactgaaatatagttttctcacacttggtgagatttgagctcagcaaacacaacttattctgtattcattcattaagattaaaatatttaaaaaatcaccaaattgagaacatcgttatgttgtcatgttcgaggaccaatgccaaaaagaatgtgagaaactagagcttaagagccaccagctcacaagttgcttgacataatttggaatcagttgatagttcaatatctggtttccccaaaaattaagtacccaatacctctttttatcattttggagcttaactgatgagctagttagaaaggagagaaagcagaaaacagaataatttttaaaatcacaaaatctctaaaaactgaaatttcaagtcaactctttataattttcaaggcaaaactgacagaattagaaatgtttaccattggaagagaagcaaccataaaaaataacttaatgcgcttcctgttttatagatttatacatccatctcccatagataaagtgtctctccaagatcccaagtctagtttgtcaaggataggattcgaattcttacctcctagacttgtgctttctccagctttgcatgctctcttgattactattaaaccttttcggtttatctctagaatatgacttggaagccaaggtggttttgtgaaatgggtctgagtttttccattgatgatatttgagttcaaatcctggttcagtttcattgccttcatctagaaaaatgataattagaccttgttttcaaaaataattttaacattagaaacgaagtacgtacaatgcctcaaacctaagatgttctgaaaatggtagctgttattatcattgcatctttgaggcctgggtacttagtatggactcaataaacaaatgacagaataaatgaaaaaaataacagatcacataagaatgagtaagtgaatgaatgacaatagtaagaattgccactaaaagataaatgaagaggcctgtgaatattttctttgggttctctccatgtattagaaatgctttgtttcctttttgatttcactcattcatcaagtatgttcttttagcctctgtagtgctagaaaacatgacccagaaaattagaaaatcaaaatgcaccgaatggctcaaaaatgtatatcagctcagcacagcctaaattggaaaatctaattgaacacctatccaaacagagttttgtaaaccttacctgcactaactattcaaactcaagcagaaaacctctcctaggaataggccaatttaattaattttactaagtagtagagggcaacatggccttgtgccagggtattcctttttactttttaaatgagtgtacacaaacgtacccctggtaccatttcaacaacctccttaatcaaactgcctgtagaaactgggagtctccaatgttaactttgctaaggtgtctttaagaccagagaacaaggaagagtcggcagtagtaccctggaaatgctaaatgaaacactcttccttatgttcttcagaagctaaacttttactacataaagttcgagatgaggcagcagagtgatcataaacaatagctttgctgagctcttcaacccacataattttctagcaaataaaagatgtagaagacctgtgtgagaggaatattctactttaaaacgatgtggcctgaaaattgaggaataagtgagatatcctttttaatactcccttagtactccagtctttttaaaaagcaaagaagtaacaaggcaggatgaaatacaagagagcaaacctgcatggaaatttgtataagagcttttaagaatattgatatttttctgctatagaagaaatacttgcacattaaaaacaataggaatgagaagaaaaaaattttaaaaaagggaaaatcctaaaactttatttcataaatacaaagccgatcttggtggtttttttgtcagctttgaaaaaaaatcaacttaattgaggcataattttcatataataaaatgcaccacttttaagtgtatatagttcaatggtttttgataaatgtgtacagcaagtaaccaccaccaaagcaaaaagttccttcattttcctaggaactcaactttacacccttatccttggcccttggcagtcaccaatatgctttctttctctctctctctctttttttttttttgagatggagtctcgctctgtcgcctgggttggagtgcagtggtaccatctcggctcactacaacctcctcctcctgggttctagcgattctctggccttagcctcctgggtagctgtgactaaaggcacccgccactatgactgtctaatttttgtatttttagtggagaaatagttttgccatgttggccaggcttgtcttgaactcctgacttcaagtgatccacctgcctcagcctcccaaagtgctggaattacaggcatgagccaccgtgcctggcccaatatactttctatctttataaattgttttcccttttgtagagttgcatataaatgaaatcatacagtacctattcctttaggtctgcttctttttctcagcatgtttttgatgttcacttatgttgtagtatatattacagatttgtggtttttttgtttccaagaagtatttcattgtatggatagaccacaatttatttctatatttatctcttgatagactgttggtttctagttttttcctattatgaccacaattcctatgaatattcatgcataagtcttcatgtgaatatatgttttcatttctcttgggtaaatacctaagagtagaattgctgagttgtataagtgaatgtttaagctcataaaaagaacctgccaaattttttcccaagtggttgcaaaattttacttttcccaatagtagcaagaatattttcagttgctttgtatcttcaacgacactctgcaccacctattatttcaattatttgccttttcctgatgactaatgatgttaagcaactttttatgttattgttcatttgtacattttcttttgtgagccttctgttcaaatcttctggctgtgttaaaagttgtttgccttattgagttgtaggagttcttaatgtattctggttataaattatttgtcagaaataagtattgtcaatattttctcccaatctgtggcttgccttttaatttctaaatggtgtcttgcaaagactgtaagtttttaatttaaatgaaatctaattcatcattttttcttttaagactcattttttgtcctaaaaatttttgcctatccaatcatataaatgttttgctccgtatttcttctaaaagttgtagcaaaaactccaagcaatactttaactgtatgcattaaattttaatatgtttcattgtcatttatattcaatttattctttgtagttaacttgttatttctcctttgattcatggcttacctggtggtgtgtttttagggctccaaaagtttaggaatgtttaaaatatcttttcatctagatttctagattgattttgttgtagttagaaatcatactccatatggtttcaatgatttgaaatattaaggctttttatggctctgtatattatctatcttggtgaatgttatcttagaagaaagagactagaaaaaaaaaagaaatctcaatctttcttcaactttccagtagataaacttgtttcaatatgaaatatcaattatagattgagtatcctttatctaccatgcttaggaccagaaatgttttggatttaggatatttttagattaagagatatttgcatatgcatagtgaggtatcttggagatgagacctaagtctaaacacaaaattcatttatgttccatatacaccttacacatatagtctgattagggatgcctaaccctgtataaaatgacacagcatgaaattaaaattttgctaaattcatatgtattaataattctaagaatatgaaattaacttgcaaatagcataatatatagtaaatatttgaagatttgtctcagaataataaatcaacaaaatggactttgccaagtctaatctcacattaaaatgtgagtatttttggagaatacatagctttattctcacatcttttagtagtattactttgccaaataacctgtctttcacaaaactcttttaaaaagaagtattctgaacatttggcagaagttttaaacaatatgagcccaaaagaaagcttatctgaccagagtagttgggagctggtcaaatatgtttatttcatataatctttaataaaattctttccatgtcaagaaaaaatttcaggaaaatcagctattatataactgaaaagttttatctcaccaaaatagttgaaaagtagcaacaatttgaggttaagagagcattctactaaattcccaaagcttcagtgatgaaataagattataaaaaataatgagtggtagaaagaaggatgaattttctacagcagattttacggtcttgtgggaaatgagaccatgtcttctccattacttgctagccaagtatacactcccaggtagcaggatttcagtgaactctggcgggctattagacaataaaatgaaactatgtgctagccaaaaatcacaagtgaccacaatgggaagaggttgaatgaggcagcacagcagggaacggtttggatgccatgttgggagaagaatgttagaagcaaatttttcagtgccgcaaaaatgaaagaatagcactcaagtataaattttctcagcaaggcaattttacttctatagaagggtgcatcttgcaggtggagcaatggcaagagcacacctgaacaagggagggaaaaaaaaggggtttttattcctgatgcaggtagcccctactgctgcatcattcctctattggctacggttggaccacacagtctaagctaattccagttggctgctttaaagagagcagaggtatgagttggagtggtggggtgagtagtttggcaggaagaacggttacagaacaggtgactcaggatgagtcaggatggagcaggtgacaggggtgactcaggtcaaagcaggtgaccaggggaacagatgtgaactaccgattagaactggtgggaaagttgtttacagaaactagaggcaagggggcaaagagaatcaggaagttaaactttaaaatggagaacagataataagagagctgagcatactgacatactgattctctgaagagaaacttggagttcactatatttaacaagaacaacctttgtctgggcctgacagctactgtacataatttactttttcagtaaatgtatctgggattcttctccaaactattcgtagattttccaccatttgaatattccttttgagtcctctattgatgccatgaaattatatctgttaggagtccacaatattaaaaatcttgagtggaaagagggaaataaaaaaggatctttgctttcttttaaattcaaattagcttcctcaagccacagctggaatagattattcttgacctttctttaagtcataatttatttctttacaagtccccaccatcaaagttttcaggacagtaagaaaaatgtctgcttcacagagtggaggacatgatttgcaacaaaccataatgatgatttgcaacaaatttgggattctttcctcgtagtttttcaaaatcatcaggctgatcacaatcatattcagctagtaaatttgctttggtttcatcctcttttaccctttcttctcctgattatctataaattctgactttttctgtgaccaacctgattattacataaagtaatgcctgtaagctaatagttcacatgttttcaatgctacctgttttttagaaactatatgctgttgtgaaaggaaaatatcttgggcccccaaaatcactaaggaaaactcaaactggaaactgcttagggcaaacctgcctctcattctattcagaattatctgtctgctcactgacatggatgcctatctgattgcctcctttgtaaaggctaatcagaaagtcaaaagaatgcaacctattcttttgtgtctctcatctgtgacctggaagctccctccccacttccagtcttcctgcctttgcttcaagttgtcccacctttcgaggccgaaccaatgtacttcttacatatattgattgatgtctcttgtctccctaaaatgtacaaaaccaggctgtgctccgaccaccttgggcacatgttgtcaggatttcccaaggctgtgtcataggcacgtcatcaaccttggcaaaataaactttctaaattaactgtgacctgtctcagattttctgggttcacaccgttatttatgctcacaacacatcagcaaccccatgtagctgatgagaaaactaagtctaaccgatatcaaattacacgtgcatacaaaaatagtaattgaaaaaatcatgtcttgggttcagggctctttgattccagtctgctaaaaacagatgtgactaattcagactttcattcactcatttgtttattcattcattcacattaagcacccattatatagtaggaaatattcaagatattcaagaaatgtaaaggcataaaaatgaattaaaaaacacattcttacatcaaagagttcacaatctttaaataattaagtgagaaaaaagttttcagccttgtgcatgtgatgaaatcacctccttttattgtttaatatgcctgcttagatttgactaatgtattttttaaaaaaacattgtgctgtgttttaggttaactttgcacctgaaaagagaacagttacctcttaaaattagagaactattgtatctaattgtgtaggtagttactatgggaatgattttatgtaaattttattttattatatcagattaagctagtgattaggtaggtggtttgcagagatactaagagccatttctctaaaagctagaaaaaggaaagctgggaagtcaagtaagtaatagtggttacagtgtttatttttaaatttttctttctttattcatttttaaaatttttttttagaagcagcattttgctgtgtgcccaggctggggtgcagtcctttaatcataattcatgcagcctcaacttcctgggctcaagcgatcctcccacctcagcctcttgagtagctgggactacaggcatatggtgacatggctggctagttttttgattttcttgtagagacaggatctgactacattgctctggctggtcttgaactcctgaccacaagccatcctcccacctcggcctcccaaaatgctgagataacaggcctgaggcatcatgcctggctacagggttttttaaccctccccaatctaatggcttggagttgaagtgttatgaattgttatgtgtaagtgtggataatgcaacacaagaatccaggtaagagacagaaacaaaaacagatacaagattaaagaatactcagtgtcctttgtacagaaggattgtgtccttccagccagtcttcctgtcagtaagatgttgaaaactcagaatgcccatcaaaatactacatctgggtttagatctcaggcaaatcaaagtggagcaaactccttcgtactttgcaaataacttatcacaagaacttgagttctggatcctaaaaactgggaagactaatagaagaaaaagtaaaggaagtaaagaaagagggtttcttttacctcttttgaatgcagagatgatcttaggcaacatttgaaacagagtatgcttttgtgttttttaacagttttattgagacataatctacctaccatataattcacccatttaaagtgtatcattcagtagcttttaggatattcacagcattgtgcaaacaacacaacaatcaattttagaactttttaagaaaagcaccacagaaagaaaccctgtattccttagccaataccctccaatccctgcttgcttactctagtactagccaaccactaacctactttccatctctctagatttgcctgttctagacatgttatataaatggtatcaaaaatatgtggtcctttgtaactgccttctttcacttagcatgaggttttccaggtcagtacatgctacaaaaaaacaaaacaaaacaaaacaaaaaactctttatttctttttatggccaactaatataaaaagaaacttcatttctttttgtggctaaataatatttcattgttatgtatacaacatgttttatttatacatccatcactgaggcacatttttggggggttgtttccactttttggctattttaaataaagctgctacaaatatttaactctaagtttttacatggacatatattttcagttctcctcagtacatggctaggagtggaattgctgggtcatatggtaattctttgttaattttttaagaaactgccacttttttccaaagtgttcggacaatttagcatttagcaaagtgcttcacaagcattatctccaatgtgttttttaaattacttcttgggaaaaataagtatggaaggcagaatagcgcatacagtttaacttctgctttctatgtcctgacactatctttggagaaaggtgacactatctttagagaagaggtcggatttagaagatatgctttcaagtctcagttccatatccagtaagctggatgacttaatagatacttaacttttccttgactcagtgtatgcatctgtgaaattggaatattgaagtactccacctgttttacatgattgttttaatggtgaaaaataacagatttgaaaagattaatatgctgtggaattgtagggctgcaaaattattattattatatctattatctatttaaagaatcgtgcaaatttttttacttatacttaaatttccttgcacttattccctgttttttaaaagatacctgttattttttctcttaattttttatgggttttgctcatcactttctaaagaaccccaagtaaggggtttgtgattaattacacacgatgatggaataaagtatttagggatgagagcaccttaatttaataactgaccttgatttacagacaaaatgtaatgcattttaaggtagaagtctgacttagcacaatgcctgcccttcaaatttgatgtctcctagtatgtgcattaataatatgaaagctgtcagtcagacggttctgattgaaaatatcctcccagttgattcactgtcaacatttcagtcccctgaataaactctcttttatacacaaaatctagaacaggttgctttctgtattttttcaaaaggttttttttttctttttttttttcgagtttaaacttttaatggattgagcagccctcgcctaacaatcccagtgtgccctttggggaaagatttccatttgcctactctttatagcaatgctcctgagccctctgtggcttgtttcccttggagaccatattccacggttgagagaccctgtgatagaataatctgatgactgtggcgtggccgaggtctgatgtgtagaagtcattgtaccagttgacggttcggttgctcttttacattttctggaggaactaggttggaaagaaaaacatggaggcagaaagcatgaatgatttttgtaggtttggtcttcttaaagctggctttgtatctgttggagatgacagacgggagagggctgatccaggaagaactgttatttctgtaattaaaaagaagcagaatcagaagagaagagccattgttcaggctgggttggaattacagtacatgcttaattaccagccttttttcctagttattttaatgttttattaatcctgttcctcaaaatatcttctttcatttacaaccactgacagaaaaaaaaatgtgacaatttgttttcctttgtgcttggtagatggcattctctaacactatgggtcaacatgaccttaacttgagttttattatgtgatacctacaatggtgtcttatccgtgcctcctactcttttgtgtttatataatttttttaaattactgtggatcagtggaccttaacccttagaagtcaaaaatcaaattttgagtggttagcagttatttgcttacatttcttctgaactgaaattacaaaaaaaaatcacttttttggggggagagagggataaaaagtgaaggaattaattggtaactagtggtgttcatatgaattcacttaccatctcaacttcaaataactaaaaccttgttaaggaaataaattggatgtattaaggtgaggctaaagtattggaggatatttacaaagaagactaatctactttggagatatttttaatatagatgagttttacttcagtggttctcaaaatggagtccccatactggcaacagcaaccgaacctgggaacttgttgggcatgtaaattctctggttccacccacaactactgaagcagagtttgtggaaatgggatccagtaatcttttgtgttaacatccttttcaggggattttgatgtttaggagttactcctcagctcattgattctcaaactggctttacagaagaatcacgtggagaactttccaatacatcaatgctcaggttttgcccaagaccacttacatgagaatcttctgggagttgaaaccgggcatattttttacagactccccaattgatcctaaagagcagccaggccagggtacagaagaatatatctcaaccctagttgcactttacaatttcctagggagatttcaaaatgtcctgatctcaaggtatccctctatacataattaaacaggatctctggggatgagactgctatctatcagaagttcctgtaaaattatcctacacagtcagggttgagagccaatacgtttgctgaagttatttgaatggactaaatgatctctccagatctgttctcttgatgcagttctttaaattttgttcccacttagcacatttttcagtttagttcattttttcctctgactttgtggcattttaatttcccattgtggtgaattaactaaatgtgagcttgtttttaacaaaagaggagtccatgcatggaccaccatggataaaaggaaaagattagggtcagacatgcacaggtggtgaaagccaaccacatgaggagttttcaggttatatgataattgatataatggaacaagccctttcttgaaacagaagccatctccacatttagagcagagtaagaacttgtccaggttgccttcggagtctctagctccatcacgcaaaagtgagtaaacaaataaaatacaagatatccacatctttccattttgagcccataggtctattagataccaagcaaagcagactggtattgatactttgtctctcccaataaactagtcaacacaaaggccaccttaaaatataataacatacaactttgttctaattcatcatgcaaagttcaatgaatgcttcacaatagggagttttcaaagattctttgatgagtgggatggactttctgagtctgatgcacaaacactcatctaggtcattcataattattacctcttcttaatttcctgttaggaatctactgccaaaccctatgttttcctgagaatggctgtggaggtcaccatttatcttctattcacatttgccactactccaagtctccatctcccaaatcagtattactctcatcatctgtttaacatgccgttctgccccagtgtgtcctacttctgatatcatcttgcaaacacagcagccagagagaatcatactaaagcactgctttgtcatgttactaccctaaaatggctccaaatttcctttaaggtaaagtgaaagtaactgtggatctcagattctccctaaatgaatgcaatccttctctccaatttttatgctggttcctaaggcaaactcgtagctccagtgagctggtcatcttgttcttttccatatatgaaaaaattctgttgtcgtgacatagaagctcagctgtgccttctaccacccacctaatgtcttcgtctatccaagttgtatctacacttttgagttcagataaaatctcaaatcctgcatcatatcatttgtttctctttgaggttctctgagcactaaaattctcaacttctgcattcactggccttcttctcctatgccctgctggtgcacctaaagttcttatcacagaaatcagtccttcattgccctttctgtggataaagatgctctcattcaagataaattttacagagctccttcttcaatttcaaatgtttccatttatctcctaagtaaactgtaacttccgtgatggaacccacattttcatccagtgctaactttatagtaggcacgtctatggattttacatggattttttaatattatttcatccattcttactaatctaagatgtaaatattattattatctgaacttcacagataaaggaagtgagacagtgaagttgtaaaaagccagatttaccctaaagaaagagctatcaagtggagaagctaaaattcagattctcctctcattccaaagcccatgatctttccctgacaatatcaaacatcttccaaactatcctttaaatctttatgactgagtttaaattatttagatgtttagaacaaaataccattttgtaacaagaagtttttttttaaatctcaaatctttcttaggcaaacagaattgcagttaaaaaattaaaaaaaaacatgaatgttatgaagtagaataaataattttctattaaatagaaatggctagtgttgatgatcatggcatgttgccagtgtgtaatgagtctgagaaatcaaaacctcagaagctgaatcaagccaaacccctgaactggctaaatgatatattctgaaggatacatgaggaggaaaaatgaagggtgggagttttccaaggttaattacagaacaatcatctaggaacaaggcagtgagaacagggaggtctggtatgcaatgtatgctgaagggctggaaccaacacattgaagatattattcaagtacagttcattatttaagaacccattgccctctgaatactttaaaggtcggggtcaactttataccagacttcatttgcattctttgttaatttagaaatgttctcttgagtacctctttaagcctctcattgtatagtgtataggtactctattataaacattcagattaatcagccaactttacccaggccatggtctttttcttggcattgtgctaggtgacccagaaagtgcataaatgtaagatatatatgatatgatattatagatagatgaatagatactatttattaagcatctattatatgatcaatacttatgatattttccataaccttctgttacatgtggaaggtagagggagtagcagcttccattttacaaacaaagaaactgaggtataagatttttctgaatttcttaaaagtcacattactgtaaagtggcaaactcaagatttgaattcagctctctctctctctattttttttttttttttttttttttttgagacagagtctctctctgttacccaggctggagtgcagtggcgcgatgtcggctcactgcaagctccgcttcccgggttcacgtcattctcctgcctcagcctcctgagtagctgggaccacaggcgcccgccaccacgtccggctaattcttttgtatttttagtatagacggggtttcaccgtgttagccaggatggtctcgatttcctgacctcatgatccgcccgcctcagccttccaaagtgttgggattacaggcatgagccaccgtgcctggcctctctctttctcttttaaaacttgattttcttttacctcaagataaatttcattacgctggggaacaaacagctccaaaatttcatcacccagcaactctccaaggcaactgtcctcttgtggaggctccgcattgcaggctgccaggctcgcaaagcacctccacatctacaggaactctccaaggcaactgtccccatgtggaggctccgcattgcaggctgccaggctcgtaaagcacctccacatctacaggggcttccacagcggggaagagtgtggggagacacacaccactctacatgcctcaactcagaagggacgccctccatttctgctctcattttgttgcccaatgcaagtcacatggaaacacctaaattcaaggaggtatttgcttgtgatatggagaggaggcagggaaatactgggtagaagaggacagttccctggcaaaagcaacggtagtagaacagtggggagagggggagggcattaagcaatttcagtaattcaggatgagataattgcatcttgagccattgtaattccactctcaagcctggaaacccatgatcctaattaggaacaggcattcttgttttcaagcctaaaagttgccttttggcccgccccattcccctcttctctacccatataaaccccaaaccccaggctccatgagcagaagataagaggggcagaagagcagcagagtagcagagtggtgtggcagagaaggagaggagaaaaggagtatctgaacatcgagaggagtttgtctgggggcattcagagaggagatcagcagcaggaaggctgatctggtgaagatcatcttcccactccatcccatttccagctccccatccatcccgctgagaaccacctctatccagcaataaaatcccccacatttaccatccttcaatttgttcatgtggcttgattcttcctggatgccagacaagaacttaggtagcaagagggcactgagccggctaacacttaagccatctgtgaatgacagagctaaaagagcactgtaacacacccactggggctttgagagtcacaggcacccacgcctagatgctaccatggggccacagcccagaagcgctcaccctggctcctgcacctgcccatctgtgtgttccccctcccataacgggtttgagtatgtggcagctgaacacacaaaccgtgcctctgttgcatgtcctgtcaggggagtcagggagctctctcatttcacttggaaagagataatgacaaatctcaaaaatatacattatacctccatgaaatacattgtattacaacaatatacctcaacaatttatattctgtttcaattcaataggtaggtagtaagtctttacttaaaatgttttgctaagagcaaaagtgataggacttggttcctgatatgaagggattgacagtctgataaggatagtaaatcctataaaaataaaatgtattaacaaagaaggacaaggaatatttgaactcagaagaaataaaggcaacttggatctggggatattaaggaaggtttaaggcatttaaatggtttttttggagaattagtaggattttattaggaaatacaaggaagaaagtccttctagatgaagaaagaaaagggataaagatgtaataggacattttacttgtggcatagctaccaagggcaagtgacttaagacatcctcctcctccatccctggggcaaagcaaggcttcttcagtggtgatgggaagggacaggaaatttgtaagagttccctgccctgtgactacctgctttgtctggtttttgctttcacactgcttccattaacatatttttatcatagccagcacaaggaatattctagagtattatgttattttgtgtttaaagggtcctacttttggaaaatatttataaggggagatgaccctcctggctccataaacagctactcatgtgccccttccccaacatattcattcacttttgggtttggaggccactgaaaagtggcctgaaactgatttctaattaaccaacccaggaagctgagaagtcacacacaggtaaagggattggacctctgaccaactcggagattcatggagaacatgtcaatggaatggaatagctattgtcccaaagccagaaatgataacggaaattctaatagaaaacttactatatgtaaacagagattttgaactgaaaggctggactcaatgtccaagatataggtaatgcatgcgccaggtatatactcaactactatgaaattattcctaactcaggcctggagatgggttatggaacctggaagaaacgctcagttgtctgatttgaaagtgcaaaggccagtgcttactcagaaacactgctaagtgtcccacaaaactggtgaaaccatttagaggagaccctcaggaaaaattctgtgtggcagccacaactgccatccatctagctcaagtggccagtcacacgtcacacttccattgcatcaggttcacataaccttctcatgaagtaaattttctggtgatggagagacagatcgtatagaaatacatgtgtataacagttagtaagtcaaatgatagaagttgctgtggagataaacatggcaaggaaaagaggcagggcacatctgtgagagtttacaatttttaatagaatgatcagaaaagatctcactgaaaggtaagtttgataaaaggttacagggagtgagggcgcaagccctgtgtttccttagggcaagaacattttaatcagagagaaaagcaaatgaaatttctgcaacagaagcatgcatgtttgttttcaaggaacactggaatctagtgaggctggggtggagttagcaaggggagagtttaccaaaagaagtcagaaagacagcagtttgtgcagtgcattataaagactttggcgtttactctggagatctagaaactttttaaaacattttgagccaagatgtgatatgaaaaggctgacatatttcaaaggctctcccaagccgccatgttgagattagacaacagcagagcagtagtacaacggtggggagtgggggagggcattaagcaatttcagtaattcaggtatgagataatggcatcttgagccattgtaattgtggagctaatgagaggtggtcacattttagatacgttttgaaggtgaagttgtcaagatttgccgagatttgcatgtgagatgagaaacaagtgcccagaattacaccaaagtttttagtctcagaaatggaaaggataaagttgtcattaactggagtggggaagactatgagaggagcaaggtgtggggagtaaaattgtgacttatgtttttggaacatccaagtggagatatcaacttgatgtgtgaatctgaaggtcaaaggagaggtccaagctaaaaatgtaaacttaggggtcatcaggatgtggatggtattttaaaaaataagcatggactatatcactgaagagtcaatgtaatgggagagaggttggaagactgagccctggaccactgcaatatttagaggtctacctagttctcgaaagtcagcccggaaccagattttacagggtagactgggatatacgccccatagtaagatatcagtttaggtcttagtcacatgacgatgtctgtatgcttttacaaccctagattaaatgcttgatatgagccacagccccaaacaatgataatcagtaatatctttcaagcccaccccagcctcctaaacccttagaccattttatataaacactcttaggctttagcccagttgcctattcatagctttagtcccacttaacactttgtgttgtcttccatttatgtacatagaaatatttgtttaccttgtttgtgagcatgattgtgtaattgatttccattttgtattttatctgtgcatgtgcttgaatcagaagtatgtgacggaataaatttactagtccatcttgacctcgtcttttcataggcattcagtacagttggcttcttctttcttgctgaacactttcttggcaatggcttctattccaccacatgatccccattttctcctgctttcagggctatttctctggtcctttgctatttcacttttcctatcctagaactctaaatgtgggagtttcttagggcttattctccaagccctcatcttcacaatctatactctctccttcaacaatctcatctgtacatctggtttgaaataccatttatatgctaattactttcatattcatatctcccttcccggcctctcttctaaactccaaacttgaatatttacctacatacacatttgattcttagaagcaccccagattagagttgttcaaaatgaaatttttgacctttccttccaatctagttttcttccagtatttctgattttagcaaccacccagtggtttatgccaggaagaagcatttcatctttaacacttttttctcctttatttccgtattcatatcaccataaaatcttgcaattcaacctccaaaatatatggtaagcccataattttataaaatatctatgtaaggcaaagcctgaagttctgtgaaacaatatgaagctaatggagcctcttagaagttgcactgtaaatgagtatcatttgatcttggatgaaacaaaataaaaatattacacctaattcctttcttttgggattgaaatggtaaacttctaaagttagaacggactttaggggcatcttgccatattcactgtctttgtaataaaaaactaaaacccagggagaaaagtgactatctgaggttcctacaattagtaatgaaagaggattagcacctacgtctcccaattcagtccagtgctctttcacagcaccaaattggcagacatccatgactaagctctgataaatatgaggcttatgccatacaaatagtctcttttatatctgttatttcctgaaaaagtaagacaaaagtggctttgtaggtatttgcagctctgtattagtagggtggatttagtttttgtcttagcataaacatgattttacttacgaaacactgatcttaaaacaaataagcaaactaacaaatgacctagcttaaatatagctcaggctaaagtaatgcaattattttaggtaaatggtatttgtatatttgtgtaaggtctaagattttggaagaaaacttctgggcaatcaatggccttttgccgtctctacctcatctcttcctagactccattactgctttcagaactattctgttataagctttaaaaacagattaccatcctttatttgatacagaagataatcctgttgatgtttttgaaaccaagttgtctacaaatctgatccacttaaataaaatatgataacaaaactgtgcctgtcagtctctgaagaaactgagagtagaattaacaaaatgtaattaaggtaatccaagtaaagattaaggcagtcgatgacaaaattattttcctatagaatagagttgtatttctgagtggaagctcaaattctcctctctttaccttggtggaatcctattattactttgattcaagtatatctttgcaattaaactgctattaattatatggaaatgagacaggaaaatactgtgtagaagagggcagttcccctgcaaaggccccacactcaagcctgaaaacccatgaccctaaatgggaacaggcatttctgtttttgcacccaaaagttgccttttggcccaccatgcccccccatcttgtactcatataaaccccagatcccaggttccagaagcacacaaggcagagacgaacagaagagtagaagaatggcagaacagcacagcagagagaagagaaggaacatccaaatgccaagaagagtttggctgggggcggtcaaagagagattggctgctggatagccaaactccagaagatcatcttcccactccattccctttccagctccccatccatcgcactgagagctacctccaccactcaataaaacccctgcatttatccttcaagtccgtgtatgacctgattcttactgaacatcagacaaggacctgggtaccaagagggcactgagttggttaacacttaagccatctgcagatggcaaagctaaaggagtgcactgtaacacatgccatgccaactttggcttcaggagttggagacacccacccctagatgctactgtgggattggagccccaaagtgcttgcccaagctcctgcacctacccatctgcatgctcccccttctgtaaagggtttgagtgcatagcagctgaacacacaagccacacccctgttgcacatcctgcaaagggcgtcagggagctctcttgtttcactaatagaaactattagagtgaaatcctatattatttttaaattctaagcttgaagttttagataaataatatttatcataggaatgggactatgcaacttagttccattaataaaaatagtgaaatgaagtctatttgttttatccaatgtaagaatgtttaagaatatgcctttaattgacatctaactttggactttggcaaaagaagagtcattaaaacaaatactgtttatgttgtcacatacctaattttggctgcatgttttaaaatcatatggttgtggatcatcagggttaagggtatagactttaggttcagaaaaatctggtttaaatcttgcctcagtcacttcctcatgattgaacaaattacttaatacttgtaagtctctttcaagtcatctgcaaagctgtaataattatttctccctaagaatgttactgtgaatattcaagtagataatatattcaaggtcttaagcacagtacttagcacatagaaaaggatcaaaccataaatatttatatgtgaataaattaatgaatgaatgatataggtgaatcttgctatttatatttatggcataaaaaggaacctgaaatgtaatgtatacattttatatcctggtggatttgtattctattaatgataataatagtgatagtcaccaccttttggtctctctattagtttcctgtaacttctttaataaagtactacaaactgcatggcttaaatttgcagaaatttattcttttacagttctggtggtaagaaatctcaaatcaaggtgttgccagggccacacttcctctggaggctctagcagaaaatcctttttgtgcctctttcagattctggtagctgctggcattccttggctgggaccatattctaatttctgccgccagggtcacattggctcctcctgttctgtgtcaaatatctcactgtctcacctttataaaagcacttgtgattggatttagggcctttatagataatccaggatgatcaccttatctaaaaaatccttcacttaattacatctacaaagaccctttctccaaataaggtaacattcacaggttcccaagatcagaacatgaacatatccttttgggggccatcattcaactcactatagtctctagagtttggcaccaagagtcacaaaatggatatgcttagaccttgcaatctatttatagatatgaaaacataatcaccacataatataggatgtttaatagaattatttacagtgtgctaagagaagagaaatgataaactgactaatttcatcagtaaagccacggagagattcatagcaaaattgcatttgagctggattctgatggatgagtaggtatttgtctaagaagagaagaaaaaattgtatgttcaaatctcagggaagacctcaaagtagaattctaaaaatatgtggtgggttacggaataacctgtatggtgtgggagtgggctagaatgtagcttggtaagatgagctcgtctcaattagatcgagacttgtatggcaagataaagggttttaaatatacctgcaatcaacaaaaaattcctggtactttttttttatacagccagaaaatgttattatctcttcttcccatggaggttggaatggagagaagacagcaagaagtcttgactttcaggtagaagacacaatagtccaggggagacctaaggtagtgatagtgaggatagagagaagaagtatatttcaaagccgtgtctaaggctgtaatactaaggcatatgcatagagaggtctctcatttgggcaactgattaatactaataatagaaataggggctaacatacaaatgcctaatgtccccacaacactaaaccaattatcattacctgaggccatcatgttccttcagacttccacactatggtatctgaagcctcgttcctctttcattccgaacatttccatctcttctacccctgcgttgtctaagctaaccacttaagtttagttcatgtgttacttctttcaagaaattctctctgacccactaaaatttagttttgaacttggccaatcttggttgtaagccttatcaaactgtttttgaattgcgtgttttatagtcttatctgtgaattccttttaaggcagggaacttgacatttatttttgcatttctagcacctagatttgggcttggctcaccgtaggagtgaaatgtagtttggtgaatttaaaaaaagaatgttggtggtggagtggggccagagtaattagctaaaattagagagctcttgaccgctgttaggtggtgacaaatgcctatgggtccacagtcacttagtattagaaataaggtgaagcctaatgatagaagttgcaggttactccttgctgttcatactccagttcgttgactggcaaagcctgcagtgcagaatctgtccaactcctctatttgaaaccaacttctaggcctatcttctggtcacttccttttctttttccagccacgtcttgaagcgacaaggaaaaagtaacagattgcaaaatatcagacacttcaaatctattattcccttttattttttatcacaaggtactgaaaaacatttcctctctggggatagaaaaggtgaacagctaaatatctgactctagcatcagatctaaccccagagcctcatcattatattaaaatgagagagtttatgagacaagtttaattgggcaaataaagagcctgttaagagaaagcaagtattaaccatcaaccattttgtcttaggcaacaaaaaatgtttatagctactcctcagctgcagaacccatcgcgccataagagacattacatgttaataaggagacgctttggtgcaactgttatctctctacgtgattaaaaaatgcttgaggtgaagttacttaccaaggttttcctacactatagcccttgggaaatcattttttaaaagttaaataagataaagtagattgaaggaaatcactgtttcaaaatgtaaacgcgtgacatttagcatctgcatttttttaacgagtgagaattacgtttcacaatgttctgttaatgctgttatgcggattagtacagacctggagactgagagaaataaggcatagcctaaagaaacgaatcagaaaccaattaaaacaaactgtcaggtttagtctacgaggcccactgcccccaaacatgttcttattacgaataaagaggtgcaggtgaacatgtttttcaggacttttatttaacttcactataagacagttattaagattaatcctgactttggagtaaaaacaaagtgctgaaagctcaattttaggataaaaagtcggctgggcatggtggctcatacctgtaatctcagcactttgggaggccgaagtgggcggatcacctgatgtcaggagtttgagactagcctggccaacatggtgaaaccctgtttctactaaaaatacaaaaactaaccgggtgtggtggcaggtgcctataatcccagctacttgggagctgaggcaggagaatcacctgaaccaaggaggcggaggttgtggtgagccaagatcacgccacttcactccagcctgggcaaaagagtgaaactccatctcaaaaaaaaaaaaaaaaaaaaaaaaaaaaaaaaagttgagcaacaaataatattaggaccataacttatgcctaatcttcagatatgttaactgaccatttggggcctgaaatgttatattcaatcttagtcttaaagttatcaattagaaaatagaaacatgtacttcaatagaattatactttgctctcttctagttcccattccccaataaatgaagcaattatctaatagttcagtagttccattagaaggcatggtcaggactggagttttctgtatcataaaactaggaagaggctctataggtatagtcctaggagatgcggaagatgctaactacatagactgtttgcaacagctgagtgatcctttgatcaaatgatcaaattaagcatgtctgattcaagctaagagtgcaggagggcttcaaaaggaattttctcctgagatttcaaaagtcttagggcatatacttaagggcagggagaacaaagcagttgtctttttaccttacttgttcactcttgtggaataagttgaagaaaccaggcatgcttatcctgaagaagagctggctctgtgggaacatgatgctgctgtcaattatttgtaggactgtttagtggaagagagagtagactcttccatatacagaatcaagagataagacaaggatgagttacagagagatggagttctgaacatgaaaaggaagatgatcttgccagcctgaaatgtatgcctaccttggagatagtgatctcatcatcactagaagcaaccaggtatagcctaaatagccatttattggatagtgaggaaatgaaattcaagtcctatggggttggggtggattgatctattgatgacgcaagagattttttttttttctaagtgtaatagtcttgacttctttgaagagtaaagtgctatgcagagaactcccacttctagctatgatggagtagctagtactggactagtacttctgatgtaaacgatattaaaagtgaaaaaattttatgaaagataactatttctagactttgggaaaaaaattgcaagactataatctctgaaagaaaggaaacaaatgagatgagccctatcatttccccaggtttctgcttggaggcatgttccagactggtgcatggaagtggaaaacatttcagagcagaatgttctctttgaattaaagaaacattgatcagaacttgggaaggattagttgtctagaatttgtagggctgaatgaaaagaagggaattattcagagaaagatgcccagaaatcttagcattttccagggactcaagatagcccctgtgcagatttctgagcattttacaaagtagaacaaataactcctggagaaagacaaagcattgagtaataataaactggataactactgaaatccatagacctgaagactgggagacattcaagttccaaccatccagagttaagtgggcttactcagtatgctgggcatccagtagaaatcccaagaagctcatgtattaagctcactaaacttgtcttttagtaaaaacttaaagagagaagtgtctgaacgtcaagagggaagaagcagctggacattggagactatggttggaaaggagttcggccaggtatggctgaactccagggaaagaccacctggccactccatcccctttccagctccccatcccactgaaagccacttccactactcaataaaatgctttgcattaaccaccctccaatctgtttgcacaatctcattcctcctggacaccagacaaggacccaggtgcaggtgaaagaggctgtcacactgaccctccactgagctgtttaacactcaggccatccatggacagcaaagctaaaggagtgcactgtaacacacaccccctgggcctcaagggttcgcaggcaacccctacatgctgccacaggctggtatggggttttgctcctgccagcacccaaaggcactctccctggctcctgaacctgctcacctgtatgttccccctcccacaaagggtttgagtgctgtggactgagtaagtgagccatccctttacaactcctgcataggggtcaaagaaattatcctgcttcagtatgatccagcagtcccacttctgggtacatacccaaaggatttgaaatcactatgtcagagatacatctatacttccatgtttattgcagcactattcatagccaacttatagaatcaacctaggcatccatcaactgatggattgattttaacatgtggtatatatgcacaatggaatactagtcagcatttaaagaagagggcaattatatcatttatgacaaaatggatgaacctggaggacattatgctaagtgaaataagcccgacacagaaagataaacgctacatactctcacttatatgtgaaagttaaaaaaaaaaaaaaaaaaaaaaaagagaacacataaaagccaagagtagaatgatggttaccagaagctaggattagtgaggtgggggttaatggggaaaaggaaattctatcattaagaaatagaacatcaaaagctgaaagataaaatatcagaagaaaaaatattcctagataggctaagatacactacatatatggcaagagaaaagatcggggaacttgatgatataagccaagcaaatagaaaaaaatgtaggctaagtggtcttggacaccagtaattccaactacatggaaggctaaggtgggaggattgcttgagcccaggatttcaaggctgcggtaagctttgattgcaccagtgcaccccagcctggttgacagagtgagaccccccaattctaaaaaataaaaagtagtacataacaatcaaagcagagcctcactgacctataagataatatgaaaccgtctaaaagatgatatgaaacagtctataagataatatgaaacagtctgtaagatgatatgaaacagtctgtaagatgatatgaaacagtctataagatgatatgaaacagtctataagatgatatgaaacattctataagatgatatgaaacagtctataagatgatatgaaacagtatataagatgatatgaaacattctataagatgatatgaaacagtctataagatgatatgaaacagtatataggatgatatgaaacagtgtataacatatgaaacagtgtataagatgatatgaaacagtgtataagatgatatgaaacagagtataaaatgatatgaaacagtctataaggcgatatgaaacagtctataagatgatatgaagcagtctataaggtgatatgaaacagtctataaggtgatatgaaacagtgtataagatgatatgaaacagtgtataagatgatatgaaacagtctgtaagatgatatgaaaccatgtataagatgatatgaaacagtgtataagatgatatggaacagtctgtaagatgatatgaaacagtctgtaagatgatatgaaacagtctataagataatatgaaacaacagtctaacaaacatgtcattggctcccatgaagaccacagaagtcagaaaatgtatttaaagaaatattgagtcagacattctttgtatttaatgaaagctatccacatacagatccaaaaggtcaataaagttcaagaaaagaagcccaagaaaaaccacaaaacatactgtaatcaaatttataaaaaataatgattaagagaaaatcttaaaagcagccagagaaaaagagacaggttacaaagaggaagaaaaaagacattgtttctcatcagaaacaatgcaaaataaaacacaatgaactgacatttttaaactgctgaaaggaaaaaataattactattgaatactatatccagtaaaaatattctccaaaaatgaaagcaaaaaagaaattttcaaaaaaagagcaaaaagaattctaaatagctcatgggtcagaacgaaaattctcggtgaaattagaaaacattcggaactggatgataatgaaaacacaacacacacactttgtgaaataaaaacaatacttagaggtaaatttattattttaatgcctatacattagtaaaaaagaatggtataaattatataagcttccagcttaagttaaaaaaagtagagcaaagaaaacaagtaagagtaatgaaggaagtaataaagaaaacaagagaagtcaaagatatagaaaaggaatataatagagtaagtaattaaaagcaaaatttggttctctgcaaagatcaatcaagttaacaaatggaccgcagagggcaaacaaacctctagctatactaatcaagaaaattaagagaaaacacaagttgccaatatcagtaatgcaagaaaggaaatcacaaaaaatactacacacatgcagagtataataaggtaatattatgaacaactttattgccaacaaacctccattacaagaaatgttaaaattcttcaggctgaaggaaggtgataacagatggaaaaccaaatctgcccgatgaggagaagagcaccagaaatgttaaatatgcttgtagatataaaagacatttttcacgctcttaaaatttctctgaaagatagttgactataacaagaacaaatagcacaaatacgagaaaatatccaacctatggggaaatgacattaaagacaaatgaaataaatggagtggtaggccgtattcatggatagggtgactcaatattaattctacaagaaattaatgcataaacagaaagcattttaaatacagttggccctctgtggtccatgggttctgcatccatgcattcaaccaactgtggatgtaaaatatttggaaaacaatggatggttgcatctgtactaaacatgtacaaacctacaaacttttttttcttgtcattattccctaaacatacagtaaaataactatttacatggtatttacattgtattaggcactaccggtaatctagagatatttgcaagtatatggaaggatgtgtgtaagttatatacaaatactactataccattttatataaaggacttgagcattcatgaatgttggtaacttcagggattcctggaacgaatctctgccaataccaaaggatgactgtaaaaatcctaacaaggattttcatgtcctgacaagcttattgcaaaatttacatgaaaggcaaagaatagccagaaaactcacataaattttccaccagatatcaaggtttattataaagctataaaatgtactgcctcataattttaagataggtaaagacaaagaggccagtacaacaggatagaaagtccataaatagaaccataaataaagaaagtttgaaataaagcagggtgtcattttcgaacagtatgggaagtatggactattaaatataagttgggaaaattggttattcatatagagaaacattaaattctacacctaccttacaccatgcaaaaaagtcaattccagatgtatccaaaactgaaaagtgaaaagaaacagtgtaaaatctcagtagaaaataatagaggttagtttaaaacctcaaagagaacaaaaaaaggaaaagaaacaaaatcctcaaagaagggtttttctgtttctattttctataaacattttttattatttataagttttaaaagtgatttcaatttttaggtttgtgggtacatgtgccagtctgctacatgagtatattgcatgatgctgaagttaggacatgaatgatcccatcaccaggtagtaaccatagtatcaatagtttttcaaatcttgctccacttcctccttcctctctctagtagtccccagtgtgtattattgccgtctttatgttcataaatacccagtgtttagcttcctcttataagtgagaacatgcagtatttggtttactgttcctacattaattcgattaggaaaatggcctccagctgcatctatgttgctgcaaaggacatgatttcattcctttttatggctgtgtggtatttcatggtgtatgtatgtcacattttctgtattcaatgcatctgttaaatcaagtttagtctaaaactgcctccttacgtattttaagttcagcctaaatgtttctctgtacatcataaactgtaacctaaattgaattataaatagactgtaacctactcttgtgccaatcaccgagttttgaccaaagatggccaactattcaaaatgtgttcaaataaggcaaatgctgagctgtaaccagtccgtttctgtacctcacttccatgttctgtagatcactttcctttttctgtccataaatcttattccactatgtggctgcactggagtctagtctctgagcctactgtggctcaccaggcttcttgattcacaaatgattctttgctcaattaaactcttttaaatttaagttggctaaaggttttcttttaacacaccattgatgggcacctggattgagtccatgtgtttgctattgtgaatagtgctgtgatgaacatacgagtgcatgtgtgtttggcagaacaatttattttctttgaatatacacccattaatgagattgttgggtcaaatggtagttctgttttaagttctttgagatattccctaattgccttccacagtggctgaattaatttacctttccatcgataatgtataagcgttcccttttctccacagccttgacatgttgtttttgacattttaataaaagccaactgactagtgtgagatggtatctcattgtaattttgatttgcatttctttgatgattagtgatattagcaacgtttcatatgtctgttgtctgctttcatgtcttctttggagaagtatctgttcatatcttttgcccccttttttttttttttttgagacagagtcttgctctgtcagctgggctggagtgcagtggcatgatcttggctcactgcaacctctgtctcctgggctcaagcaattctcctgccttagcctcccaagtagctgggattacaggtgtgtgccaccacacccagctaatttttgtatttttagtagagacagggtttcaccatgttggccaggttggtctcgaactcctgacctcaggtaatctgcctgccttggcctcccaaagtgctgggattacaggcatgtgccaccatgcccagctgtcttttgcccatttttaatggagttatttgttattttgcttcttgaattaagttccttatagattctggatattagacgtttgttagatatatagtttgtgaatattttctcccattctgtagattgtctgtttactctggtgatagtttcttttgctgtgcagaagctctttagtttaattaagtcccacttgtcaattgctttttttttttttgaaagagggtctcactctgttgcccatgctggagtgcaatggtgcaaacatggctcaccacagcctcaactttctgggctcaagttatcctcctacctcagcctcccaagtagctgggaccacaggcatgcactaccatgcctagctaattgttttcactttttgtagagacagggactcacaattgcttttgaggacttaatcataaattctttcctaaggccaacgtccggactgctgtttcccagattttcttccaggatccttatactttgaggtcttacatttaaatatttaatccatcttgagtgaatttcattatatggtaaaaggtagaagtccggtttcattctcctgcatatgactagccagctatccctgtactatttattgaataggaagtcctttcctcattgcttatttttgttgattttcttgaagatcagatggctgtacatgtgtggctttatttctggattctctattctgtttcatttgtctatgtttccagctttgttcttttttacttaagattgctttggtttttcagactcctttttggttccatatgaattttagtatatttttttctagttctatgaaaaatgacattggtagcttgatagcactagcattgaatctacagattgctttgggcagtatggccattttaaagatattgattcttccgatccatgagcatgaaatgtttttccatttttttgtgttatctgtgattttttaagcagtgttttgtagttctcctcgcggagatctttcacctccttggttggatgtattcctagatatttatttttgtacatggctatatggtaaatgagattgtgttcctgatttggctctcagcttgaacgttatcagtgtattgaaatgctaatgagttttgtacattaattttgtgtcctaaaactttattgaagtcatttattagttctaagagacttttggtggagtctttacattttctaggtatagaattatacagtcagtgaagagagatattttgacttattttcctatttggatgatctttatttctttctcttgactgattgctctggctgggactcacagaaggatgtttaaataagacacaaaaaaagcacaagtcatgaaagcaaagattaataacctatttgtattaaactatacttttgttcattataagacaccatttagaaactaaaattgaaaccaaaaactggtcaaaaaaaatcaataaataaaaaagggacaaaaattcccagtgaacatacaaagaaatgactggcatccagaatattcggagaactacaaattaataagggaaatacaagtaagtatctaaacaagcattgtgcagaagtggagaacaagaaaataggaactaaacattgggtactcatggacataaagacccatgggttgaaaaaccaccttgtgggcattatactcactatctgcgtgacaggatccataccccattctcagcatcatgcagtgtaatcacataaactgcacatgtaccccctgaatctaaaaattgaaattataaaagaaaagaaaaaatttttaaaaagccacaatgtaaatccattttacagccatcatttgggcaaaaattatggacttgtgaaaatgtggtgcaatctgaactctcgttggctgctggtggggtatgaatcactaggtatatattgggagaacagtttggtggtctctataatatttcaaaacatatagtaaaattacacgatagccgcaaaaataagagtctccttagaagaaatacatgtaaaacaaaaggtaaaaggaaaacttaacctaaaaagagcaaaaatgtctttgttgaaacagaaaaaataaagcaaaatgataaccttaatttgaggaatatatgaatgacttaaattgattattataatgcacaatgaagatatagtacaaattatcacttaccaaataacatagattcaaattagtaaagcaaaagctattagaaaaaaaggggaaaaattttttaaaataaaactttttcagttgggaaacattaacaaatatcaacagacgttgtgatcaaatctgccaaaactaacatagaaaatttgactggcagaattcttgagcaccagttcatggatatattgaattttctactttaaaaagtgaacatgcatttttccaacatccattaaaattttatgaaatttaataatatattatgtgtcaaagagcaccttaattaagttcagaatataaacgagcaagacctaaagtaaaactaagacaacatttaagaatggcaacaagatataaaatttacataaaaatcaataatttccataaatagaataaatcattggaaaatgttaggaaaaatctcttataattctgcccttcccttccaatactgagaaataaacttaacaagaaatgggcaaaacatatatgatgaaaacttgaaagcatttctgataaagacttaccaaatggaaggagacgtctgtccttggataggattatgcagcttcataaagatatcagtttttttcagtttcatgtataaatttagtgcaattcaaatacaaataagtgttcatttgtttgcttgtttttctggaataagataaattgttttgaagattgaatgaaaaaaataaacatgcaagaatagcttgaaaatcccttaagaagaagaggaataaaggggaactagccctactagacattaaaatacactattaagttctctttttaaaatgtgatactgggatataatagacagacataccaacgaaacacaatagagagcctaggaacaagctgaagtgcatgtggaaacttagcatatgtaagacatcaaatcactgaggcagacatggacatttaataatgaatttgacacaactggataatcatttggaaaaaaaaagaaaattgtactcatacctcacataatgcatcagaaagaactccaaatggatctgaaatgtaagtataaacaatgagagagatatgtacaagaggaaaacatgggcacattttttataaacttagagtgaggaaaaccttcataattagactcaaaatccagttgcaataataataacaaaaaaaaaagattggtaaattttactgaatagaaacaaattgcatgacaaataaaccatagtaaaatataaagaaaataacactgtgataaaatagttgaggtgtcatggataaaaggccaatttcctggatgcataaagaattctttactgtcaaaggaaggaaatatcaaaatctgacagaagaaatggcatttaaaaaacatggggaaagcactcaacttcactcatattcaaagaaatgctaattaaagctaccgtgtgatgcaatttcttacctattagcttgtttggcaccaattaaaaagcttaagaacccactctgtcagtgaggctttggagaaaaaggcactcacaaattgctggtgcacgtgcaaaatgatacaatccctatggaagggaagtgacagtgtccaacaaaactccacacacatttatcctttgatgcaacaatccacttctaggaatatgtctgaagatacactcccacaaataacaaaaccaagttacacatgcatcattatttataatagcaatatatagaaaacagcccaaataaccatttatgggagactgagtacactgtagagccatgaaacaaggtactgtgaaatcacagagagagagagaaagaaatcaactgatacaaaggttttttacaaagatatgtggaccaaaagccaaacacggggtactatgcttccatttttttggtaagaaagacaaggtaataagaatatctatatatttgcttatgtttgctaaaagaaacacagaaagaataagcaataaatttaagaaaatggatggaaatatggggaagggagaatgcagatatggatagagctatagatagagaaaaagagagagagagaaagactagatatttatcaaggattgaaccagccttagtttgtcgtgttatttttccaccataatgctttttgtttaatttgctattttctgaccatgattctcaaattgctaattatctaggctcctgatttctggcctgtcttcccagacaccataggacacttttctttttatttggactttaaatataaggtcgtaacatttattcttttcaagttgaattatcctgcaaaatgaccaaagcaattctcccttttattttcagctctttttcttgcagctttataagtgttgagaaacacagactttctcctattgtgaagtaaagaaacctaaaatagatctttttcaaacctagctatgttgtgatgggggagaagcagggagcacctatatgtttttattgagtagtgataaaaaaactatactaaattgttggctaggagacaacataactcatttcctttttttcctatgaatattccaggaatatttccacatacccatggcaaaatgcacttggaaatgatcagtaaatccagatatttgtatgtaagctcaaataatttttactaactgcttacattctgcaggcacactagctgtgacaaattgatggtctggtaggaagtattctgggggaactttaagactgctctcagggacaaggcctgaatgcaggattcttgacaaatatcccttagccagaaaagggtgatcaacagtttatgtggtgagcagattcttaatattattaaatttttctctaccaagaaacatctcatgggggaaaaataatgggctctctgatacagtttggatgtctgtccctgaaatctcatgttgaaatgtaatctccagtgttggaggtggggcctggtgggaggtgtttggatcatgggggctgatgcctcatgaatggcttggtgccatcctcttgttgatacatgagctctcattgacacagatctcattgtttaaaagcatgtgggacctctcccttctctctctcttattcctgcttttgcagtgtgacacctgctcctgcttcaccttccaccatgagtaaaagctccctgagacctcccaagaagccgggcagacgcaggcaccatgtgtgtacagcctgcagagctgtaagccagttaaaccttctttttctttctttctttttgttaagaaattacccagtctcaggtatttctttatagtaatgcaagaatggactaacacagtctccaaaccctttaacaaagtcctacgtggtatggctctgcctgtctctctgacactatcttgtaccattctttccctcggtcagtgtgctctggcatgaccgttttctcaaatacatcacactaattcatggtcgggcaccgtggctcttacctgtaatcccagaactttgggaggctgaggcaggtggatctcttaaggctagtagttcaagaccagcctggcccacatggcaaaacccgatctctactaaaaacacaaaaattagccaggcatggtggtgcatgtctgtaatcccagctgcttgggaggctgaggcatgagaattgcttgaacctgggaggcagaggttgcagtgatctgagatggcaacactgcactccagcttgggtgacagagtaagactctatctcagaaaacaaaacaaaacaagacaaaaaaaatcaccttaatcccaacctcaagcctgagcaacaggtatttcctctgcctgaaacgctcttctcacagacctccacatggatggagactgctgattcaagtggcagcttggaagccttcaccttagaagctacctcatcccacatccagttactccatcacattttgttttttcaactttcttatcactatttgaaattatcttatttacacatttatttcctgtttaaatccacttgggctgctacaacaaaaacaccataaactgggtagcttataaaaatcagaaatttgtttcatatagtcctcaatgctgagaagtccaagatcagagaactagcatggtgggtgttggtgagggcccactttcttcataggtggatgtcttctcactgtcacttcatatgttagaagggactacagtgctagctttcccaggcctcttttacaggacacaaattccattcataagggcacttccctgccaagtcctcatctcctaatactatcatcttgggaattagaatttcaacactgaattttggaaggacacagacattcagaccataggatcttcttatctatttttgactggtcctattagatgtaagctccacgggcataagaatcagactcatcttctttgctgttggctaatatgttgacctctagagtagcacaaagaagtctcagctcatactatacagtaagcacttgttgaatgtatgactgaatgtatcacaaaataccagtctttataaaggtctgcagtagacagaataatataccccctcgggatgttcatgccttaatccatagaacctctgaatatgtcattttacatggcaaaaggtactttgcagatataattatattttgagaaatattatcctggattatccaagtacatccactctaatcacaagggctcttattagagaaaggcatgagagtcagagttggagagagactggaaaatgctatgctgttggctccaatggtggaagaagtgagccaaggtcatgagccaaggaacgcaaagagccggtaaaggcaactggacaagatgaattctcccctaaagcctccagaggaatgcagccttgttattaccttgattttagccaagacctgtgtcacacttttgacctccaaatctacaatataaaaatgtatgctattttgagccactaaatttatggtaatttattatagcagcaagaggaaactaatacaagtgctatattggctcttcccagtgtattagcaccacgtctacattagtgtatgtgctagggttccccagagaaaccgagtcatgagggcatctctctctctctctctctctctctctctctctgtgtgtgtgtatgtgtgtgtgtattacttctttatatgtagagagggacaaagagagagagggacaaagagagagagagaaaaggagagagggagaaagaaagagagagagggagacacacccagagagagagagagagagagagagaaagagagagagagagaaaaagaaagactgaaagagagatatttattatttattttaaggaattggctcacatgattttagagtctggcaagtccaaaaaatctgcaagggtagattagcaggctggagacctacagaagaactgatgttacatttcatgttcaaatatagtctgggaggggaattccctcttcctagagggacctcactcagtctttttctcttaaggccttcaattaataggatgaggcccacccacattacagatgattctttgctttacacacagtctactgactcaaatgctaacgtggtctaaaaataataccttcaaacaacatccagaagaatatttgaccaaatttctgggtatcatggtctagccatgttgacatatcaaattaaccatcagagcatgtcagagaggtgctacacagctattatcatctcagacattgtattgtttactgctctgatgtacattttttttcttcaaattctcaggaacaaaaagtattcacaggaacaaagccataaatacaagttatttaggcaatatttttcctgcaccgtaccctctgctgagctggttagagctagactaaactatatattttctatctcagggaatgtggataggtttcttctcaaatgtggaatgtgaggaaacatgagcaatcgccaccattctgtccacacgttaactagattcgtatggtgggttttgcttgtttgtttgtttcatgctatctagaataggtttattttctggtagcaaaattatcttgatttgattcagagaaacaaaacttacaaggctttactctggtatgagtttgaagatactggtcgccaccacagggagtctgaggatgaaatagacatagaggaagcagatcaatagaccatgcattgtgcacagctgaaatcaagttctacctgaagccaatgctatccctggacttctcggttatctacaccaaaaaattccccttttgcttaagccagattgatttgagctttttatctttttcaagtaaaagggcactacatgtattaaaattaacttctggaatgttgtattagaaactcttgaacctagaatgtgaaatttctgagaagaggagataagtcaccaaaggtttctggtcaacgtctaaaataattatcagggctcctgacatacaccaaaatgaagtgggcttcaaaaaaggtgcagctccctgaaaggacatcatcctcagtacccagctcttaagtaggacaatactcaaggggggatccttccacagacgagaaccaggagctatggggaaataaatggaaatgggcaatgatttaagaggtcagagccaaggtcagccacattggactttgtctggccagagcagtgagtcattgcttttcctgcccatgggataggtgtgtactatgaagtaggattcattgtgcattgttttccactccccctcatcctttctatatgtgttttggttataggtactgggtccttcctccccattgcacagtgggtatgtagggatggttaaacttactagccatggatcagtgaaccatggggacctgtatcctaatctcactgggtgcacatccctcagagagtttagacttgaagatggatacattaattaaatgagaccttgaactgtctccctttgaggttttacattttggacaaaacaaagataatacacggaggtttcatctgttgtccttgacactcattatctattctctgtttttggaacacagtgtgctgacttccccacattcagcttatgtgcttagcatgaggctaactctctctcaatctacgagggtttggtgtacgaccaaggttaagtcaacctgcttgtttcactgcctggtcatcgtgtttgggttcatgtcagggatataagccaagtctgtgcaatcagaacaatgaggcacaattctgggactattgaatggggaagcaaactctctcttttgtgctgctgggggcctaaatctggctcacctataaatggagccaactcagaagcaaaaccaagaaatgaatctgttgacatcatttgaacaaggaatcaagctcttatctaaacaacttgctctctctcttcaaacaaatataactctagatatatgtcatacattacttaagtctttttgatgtaagttgccagtcacctccaaaggtaaaagtattccaacaaatataagtctcttatcctatgggagtaaattttattgggataagtaagataatgaagtattgttgaacaaaaaaaactctctaacctgcttttctaactgctgttattctttgtagtaggaaatcttagtagctgcatctgtcaagatttttcactggtgagggcttcacctgttccagctcctgataagattgactcccagccactcttcttcatcactttcactagatgacagtttatgacaggccttctagaagtaggtgctaccatactaaaggctctttgcaggaaataatctctttgggtttgttttttaacctgtaagttgttcactaagaatgttaagaaaggaagttttaattattcttagaattttacagctggggattatttagcacttatctaataatccagttaatgatttacagatgaggttcattgaaaaaacataaaaggggtatatcaatgaagatgatgttcaactataaataataaaggcccggcgtgtagtaagctaaacaagagaaaagttaactttttaccatctggatagaatatgaagacctacagttttggtggagactgctttttgattacaagtaagcattctaccctactgtctttaaaaagttcttggacacaggaactgattgtccagttgtactacactgcttagcttccccagcattcaagtgtgatcaagaagactatgacattcccaaaatgatttgagcagaagtgatggatgctttcggtcattaattatgtgctttgatgttctccttgcttcctattggcttcaaatgataaaggctaaagcaatctagaagccatgcattgaggatggcagtgtgctcagccagtctgattctctggctgattttgagaagcacagtctgcctttcctaacttgtttgaaccatcatgtcaagggactcttttttttttccacagaagcatgacctttactataattaatagtgtaatattaattaccttcaattgtaaaaccttttacaaaacttttacaaaggttttagaattgtgaaaccttcaattctgtttctctacttttcttagtttccatcaaagacatttcatgatccaaaatgcctacagaagtgcctgccattatatgcacatcttgagtagcaggaagatgaagggacaaatacaaaagaaatgatgctttttaaagagacttcccaaaagtaccttgctacacttcagtttacatattattggcaagagcatagtcacttggccttatttagctgcaagggaatacatctttaactgggtggcaagatgcccagctataaaaatcagagttgttttactaagagagagggtgtgtatggggaataaagtggcattttcttttgtagagaggaaatcagtctttaatttcttatcaaaaggaaaaatttttaaaaagcagcaatgaagttcattatagacatgtcagaaatggaaatttttttcaatctgcaccatcacagggccaagataaagtttttagaatcttcattaaaatttatacttctgggagtcataagcgccagtttcatttccaacgtgtgcaatattataaagtggacctgaacaggctgtaaagtggttaggatgtcacttgggccaaatgaaagctttgagcttctccacatggacaatgaaaatgagaggtgtttacaagagacttttgggttttgtttgaccttagtgaaggggagtatgcaaccaagaccatcacacagagccatccaccctgcttacagtattttgtcttgttctatgaggatatatccatgtcaaaattttggctcaggttatgtccagttttcttaacctctttcttcttccttaagaccttctctggggacttttcttgacctaaacaggaaggcctagcaaggtcttttgcaaaactaaggcagtattcaaggtcttcatattgtcatctttccttaaacatgatcacaaattctttttttttttttttttttgagacggagtctcgctctgtcgcccaggctggagtgcagtggcgcgatctcggctcactgcaagctccgcctcccgggttcacgccattctcctgcctcagcctcccgagtagctgggactacaggcgcccgctaccacgccctgctaattttttgtatttttagtagagacggggtttcaccgtgttagccaggatggtctcgatctcctgacctcgtgatccgcccgcctcggcctcccaaagtgctgggattacaggcgtgagccaccgcgcccggccgatcacaaattcttaagtgtggcttgtacactcatcagttttttgcaggtaagggaatattttgatttattcttctactaacatgacttcttatctctcatcataaaaggcagaagcatcgtaattttttcattttaactagaacatttaaatttaaataaaaagtttaaatagaaaattttctttatatgagaatcattttctttatctgtacaatgactaataaaaatattttctgtgacaatttcttaacagtctcgaatgcagcctttacttttattttgtcaataataataacagtttttctttttttttttttttttttttttgggtgacatggagtctagctcttgtcacccaggcaggagtgcagtggcgcgatcttggctcactacaacgtccgcctcccgggttcaagcaattcttgttactcagcctcccaagtagctgggattacaggcgcccgcaaccacgtctggctgatatttttatttttagtagagacggggtttccccatgttggccaggctggtctctaactccctacctcaggtgatccacccgcctcggcctcccagagtgctgggattacaggcgtgagccaccgtgcccggccaacagtttttcatggatagagctcctgcaggtgttcctccagcactttgcatttttcatctcatttaatcttcacaagaacctcacaaagcatatattatttaatctattttatggataagaaaactgagaatcagaaaaaatggatactgagataaatcctgtgttactgaagtctgatgtgctcctacctgtgtttttcgaggcagtaagatggcttacactgctctgtcctgccaagtccctctggaatccctctggctgtccagctgtccctctcagcccatggcaactcagagtgcaaagccattgttaatacctagtctttaattttatgttactgcagattttaaactcagttccactccactccagcccacacattacagtcatcctttttccgacaaaggagtaagtaaagagcattcttacctgattgcaccacctcccaccccatgaggtgcaaacctcctgggcacagcagagacaaactattcagataagtaaagggtagcaggcaaccacactattctgtttcccagggctactttccatcccatgctgatgccatagtctagagctgtcctggtaggagtataaattttactaccccttggagctgccatgagagcttgttaaacaagacaggaattaacattttttattcactatgtcctccctttggaaatgctttatggctggcttaggcattttccctagcaacccattctctattttagggaaatggaaataaaatgcctgacatttacttcatagagcaattcagaataatattaaggaaaatttggagccatttctcaaactagttggaaggagcatggaatggacatagttctccactgagggatcctaatgcatgctttatcctgacattggtagaagagtaacatgtggccacattctgtattcctctaagcagagatatcaaaaggagataatctggagaagaagagaaaaaaaactagttaacatatagcaagaacacacatattctctactgatgataaacctaatttttcttaggccttcgtcaacactggcctggtttggctaccttttctggtggtctgagaaacccttgacgttcaaatgacaacacttttcctggatagaaaagagagaaagcagctcaggatattttgagtcaacttaatttataaatttgcaataatactacgattttctattttattcaagtgcaaaaatatttcaaattttttttaaattaaagacttagaaaaatgaatgagagttatctagacagtattcagtagatcacatatcaggctactttatggcatttaataaccattagatggaaataaacaacttaacatccctacttagatacttcataggcattgcaaacataatatgtccaaaatccaactcatgacctgccccaccatgtctgctatccccatttctgcctcattccctgccattggtctggttgtagacccagaaaactggaaatctcccttgatatcctcctctttcccattcctggtatttaagccatcatcaagttctttaatttgaacttcaaaactctcctggaatttatatactttcatcatttccacaggccagccataggcgaaggtggtcacctagacttctatagcattctgactttctctagccgtattttaaatggattatccataccactgtcaaaataacctttgaaaaatacaattctggttgtgtattttctttgcttaaaatgcatcaaagattctcactactgttgggacaaatgtgaaagtcttgtcccagccgtatggcccagaaagtcatgaagacctcacttatccccaaagccttctcttaagccagtttcctattggtttcttagagtgttgcttttgtgtctctctttgtgtgtgtgcttgagtgtacactagtgtgtttctgtactttatagacttgccatagtagggatacagaattattatttttctttttactctagatctgtgttttgccttactggtttgtgcctcaattccagagaagccttaacgtcactgagagttaacaatcgcttgacaccaatctgattaacaatcactccctggcgccccaccaagatcctgcaggtcaatgatccagcagcaccacagtccagccaagcggcacacaagtcattttagcttcctctgtccagggtacaccctcctaagaagcaacctttttgcctagagtgttggcttcaggaaagtcttattagtcattgcagttgcaattcctgggctggttcttgttcctgggtgctgagggctgtttctcaagtgtaatggccttcaacctgttaaggaattcccctcccccctttttaatatcctgtcataagattaatagttcaaacgtgatgccacatgcaaacagcctgataagatcttacttaatgaaaagcaagcagagactttcttctgtgaacatatgtcttttgagaaattcaaagcaaattggagataacatgtaaaatatctcaggaaaagaaaaagttctaaatgagaacatttatcatcatcatagattcatgtgggctgtcaagacacaataaagattttaactcattttgtctcaggcagccttttccacgaggactttcattaacaatactccctgcttgacctgtttctgctcagccacatctcccactgtggaggacagggtgtgaaatatatcttttcaaatggatgtcattgattttaatatacctttaataatattgctgctcagtgttttaattactcatacttattggtacttccgccctcaggtgattttatctaataaatctgataagtacagtagactctgatactcggatattagatgaatagctcatgctgtggggagaccatttcctctgtggtggactcagacatgggtcaaaggtgtgcgctaaagagcccagagaaggggaaggcttttacatgctcggcaacagccggacattcttctctactccaggcagccacaccaggagaatccttgacagtgctgtttgaatgagtgcttcattttgcaatctctgcccagtctaccctaatcacaatgtaacactccttctttgtgctttgctggcatttagtgcttatcattagtattcagcttttcatattttattccagttaatcacatgtgtatgcatttttgtctactgttgtgggttgaagtgagttcccctaaagttcatattttgggattaacccccagtacctcagaatatgaccttatttggaaacagggatgttgcagatgtaattagttaagatgaggtcatactggtgtaaggtgggccctgaatggggaaatttggacacagatgctcatacagagaagacattgtgaagactcagggtgcagggagaacactgtctgcaagccagagagtgcctgaggctacaggcactgaggttatagcctgagagtaccagaagctacaagaggcctgcaacagattctccctcacagcttttagaagaaaccaacccaaccaacaccttgattttggtttcagactttaaaccatcgaaactatgagacaatacatttatgttgttctaagtcatgcatttggttacggcagccctaggaaaaaataaacccactaaagtatagcttcctgataggcaaacatctcattttactcacctttgtgtacctgaaatagggtcaacataaggtggttggttactcaataaacgtttatggaactttattatatgagtggtgaagaatgaagatgcaaaaagttaatttgttggagagtaaggaagatggtaagatgatgtattcttccattgcttggaaagatgggttaggaggaaatgatgacccaaagagtatatattttagcagggatgggccaagaaaggtggttcagatctaaagccataagtagcaagcatttatctgaacatacccctatggggtgctgggaaacatgaggaaggctggcaaatgggctcaaagacatcatacaagactgagggttaggacccagtctgcatttacttagcccacgttacaatgggacaacaaactcaaaaacacagtggaatgccttgaggaaaagctcagttcttgcaaaaaactggaatgcaaattacaagcgggactatgggacacagaaaaaattactatcaagcaactggaattcctctgaaagtctcacatgtttgagacaaacagggaatacctaggaattgtacctgaaattaacagccctggtgctaaagccttgggggactgtttaaggacagatctgtctcgagatggtctttaaagagtactaggttttatgtaggattatagtacacttggctacagtctgggataaagtaacctgacacagtacatctatttttggtatcagttcacatctaattgaagtgaataactacaactgtaaaccagtgactggctcaagcagaaactgcaaagtggttgctgttactctgcaagcagctcatgaggttctcttctaggcctatacatttggcccacattccattttttatgtttgaattagttgccaaaaatcaccatttggaggagcattgttcaaggtgtggcttcattcctccatgactctgtcttggcccatgctacctgttatgttcctgatcctgaatttaaaggatggcagggagcaaaaagatgaaacccctctagttttcaaaaattcttttaaaagtaggatatagaatgatgttggcctaaattgttttaatttacatatatctaaatgcaaattctaggattggattctagagaaaaatcatagctgtcctacttgtaacaaacatttgcagtgtaaaaatgtctagatgaaaataaagcgtaactaagccagatggatggggaagtgatataactaataagagtttaaataaagtaattggttttatgattttgtaagtagaaagtgagaatcatagaaaacttaaaaatatatgaaattataaagaaaaaaaaatcacccacgattctactacctgaagacaactgttgggattttcttgtgtcttttctctatgtggaatgtcacattccttctgtttttaaatcaaattaaattgtagtcctcaccagctgagttggaggaaaatcccagtaattattaactcctatcttggatggagattgggtaggcagggtgtctttcaaaagagtcgtgtgtggttttctgcagttgaattctgaaaaagagtgtggttctccattccacactggccaccacagttctccaacttttttaagccaggtgtaggaacctttgatatgggctcccagtccatgagttttaatattctaccatttttcccccaaacctatgaaagggcaccacacaattgcactattcctccaaaagttctattactagtaggctggctgtcaccatgtagaaggaaactgagggggaaaaagagtctcaaccacttcccagtgatgggagaagctcctcatctctccattgctaattcccctgtttctgctttttcactctagaaacacttgcctctcagccatccctccatatccccacttagcacaaccttttctaggaagctggggtggaggtgagcatggcatctgtggagtgtcaggaaacttctgctttggaccttcccattattattatgcctataacaattttattaatataattttattataggcataatacaattttaaaaataattaaacctaaaaaaagagataaaagagagtcctgggttgggtggacagtcacactgttacaagtagaacaaagagatgtgaaagtctccaatgagatatggaaacacagagaatgggtgactttcttgaaataataacaacaaaaaaaactctatatcaggaggaaccaaaaccaattaatttctcacaaattttttctgctatatatagttgatataattagaatcataccatatatgcaattgtctattttttgttacattataactaagcatttttcaatgttgttaaaaactctaagcaaacgtaattaagagctgcagagtactcaagcatgagtatgcatctatgcacataacattagaaaagacatcataatatgggagtcaggagaagcagctatggaaccagactgtagaaattccaatcccagctctgcacttgtaactagcataatcttgatatggtaattaacctcatcgcgcctcagtatcttcatctgtaaaatgggcataataacctgcattcaggttcccatgaacactaaataagccaatctatgtaaagtcctgagaagagggacttacagagtggacaaaaggctgacaattattttagtatattgctgtgctgtgtgtttaagactaggtactctagacagccacccctctgtttgaatctgggctctgcgttctatcatctgtgtgacctttgggaaattactcagcttctctgagtttcagttttctcattgatatggtagtacatttttgggggttgttgtgcagattaaatacaataccaaaaatgaacccctcagcaaaattcctggcaaaagtcttcaatatattatgacttaatctttccatatcccctgtgcctaacccatagcctttaagtgctcaaaaaatattagttgtatagaggtttactgattaaaaagctgagttgtaatgtactaacgtgtttattaaaagaccttgagaaatacacaaggatttagtaatagaaaatatccatgtggaaggagattggggagaagtaaggggaattcactttttctgtcttcaaagtttacaatgaaaagaaatttcacattttaaaaaaaaagaggcaagagcagggtcctgcagattcctgagatgggtggacagtcacactgctacaagtagaacaaaggaaaaagccgagtggaacatgtattccagatctttccaacaggcttcagatctcactttcttttgaccttccctttgagctcaaatcaacaatctaccaagacagatgataaggcttggctgcgtccccacccaaatctcatcttgaattgtagttctcataatcgccacatgttgcaggagggaccaggtggagataattgaatcacaggggtggtttctcccatcctgttctcccgatagtgagttagttctcatgagacctgatgattttataaggccttccccctttgctgggcactcattcttctccttcctgccatcatgtgaagaaggacgtgtttgcttccccttctgccatgattgtaagtttactgaggcctacccagccatgccaaactgtgagttaattaaacttctttccttcataaattacccactattgggtacgtctttactagcagtgtgagaacagactaatacaacagaattgtggtgttttccctgaatgagtagttttcatatatatatgtgtgtgtgtgtgtgtgtgtgtgtgtattaccattgtaatatatcctattgtaatacattatattaaaatcttctctgtgttgcagtgaagtggtaaaaaaagcagtttgtgtttgtatgggaaagaattcggcacagttggcaagatcatgaatttcccgggacttcatatttccctgtgtgcagatgggtgttgctaacaaccccactcacacatggacctggtgaagaggtgattggtgagcttttcagtagactctcctaggtgggttaggccacttcatccagcactttggcagcagctattcacagatgagggcactgtgctcagagtaaggcatgatttataaagaaggggctgaccgttcattccacttgtcagatcacggatggaaagctctggccattgggtctgctcacctttctcctgccagatcccagttcagattagcgaagcagtcagcctatctcttgtgcattacagcttacttccttttgtgaaggaacctgccatttggctgcagatatattcaaatttgcaggtctcagagaaaggagaaagctccaggtgccaagctgatagaaagatctgtgttctttggtggtgtcttgtgagcctgagatttcagagaaaatggtgtaaactagctcagatgccacagtatcaaatcagaaagaaaggaaaagacttgggcctaaaggccttgttttgggtggaaaaaagtccagacatcaagacaactttgattcaaatcctggcattgccatttaccagcggtttgactttggctttcttatcctggaaggacttcagcttcctcatctatcaaacagggataaaaaatatctacctcagagaactttcaggggaaaataatggcataaattgctagcatttgatagacattcaacaataataataacaactgtaatcacgagtggcttttatgtacattcagaggatagggcctacccagtgcccacaccttggcaacttgaggtctgctaaatgtcagccaacttgttgatttagtaataaatttgagatggtgtttcttcacagtattactcttttctttctttctttctttttttttttttttttgagacagggtctcactctgtcacccaggctggagtgcagtggtgcaattttggctcactgcaacctctacataacaggctcaagcgattctcctacctcagcctcccaagtagctaggaccacaggcacacaccaccacacctggctaatttttggattttttgtagagatggaggtttcaccatgttgcataggctgtccttgtactcccgagctctagtgatcctcccacctcggcctcccaaagtgctgggattacaggtgggagccatcaattttgtcttctacattttaatagaaggcatttatgaatagctttcttatcaatttaaacattttgagtaggtcaaccccaaggagctattactccataccctttaggatggctataatcaaaatagcagaaaacgacaagtgttggtgagggtgtagagaaattggaaccctcgtatattgctggtagaaatgtaaaagggggtagctgtcatggaaaatggtttggaagttcctcagaaagctacatatggaattaccacatgactcagcaagtcacttctacgtaaataaccaaaataattgaaaacagaggctcaaacaggtactcacatgctagtgtgtattgaagtactattcccaacagtcaaaaggtgggaacaaccctaatgtccatctacagatgaatagataaaatgttatatacatatgataaaatattatttagccataaaaaggaataaaattttgatacatgctacaacatggatgatacttgaagacattatgctaaatgaaattagtcagacacaaagtgacaactattgtatgattccactgatatgaaatctctagagtaggcagattcatagaaacagaaagtagatcagaggttaccaggggatgaggagagtggagaacagaaagttattgcttaatgaatacagagtttctgtttaggttgatgaaaatttttggaaatcgaaagttgtgagggttgcacaacattgtgaatgtaattaatgccacttaattgtcaacttaaaagtagttacagtggcaaattttgttatatatgttttaccacaataaaatgctttacaaagtaaataaatatatgacctcttatttttaaaatgttttgaatagttacacattcacatagctcaaaaatcaaagcagtatacattgataattcttactcttctctccaatctcatcagttttgttcctttcatcagttcccacaggtaacccctgttattagtttttaatttatattttaagtatatctttatgcaaatagaaagcaagactaaatacaaattttttgcctctttcatgtatacatatattaacacatatgtactgttctatgtctttgtttttccatttaaagatacatcctagagatatttccagtatataaagagctgccgctttcttttgtactactgtataatagtcaattgtgtggatataccatggttaatttaaccagtcccttagtgaagaagtttaagttgttttgaattttgatatttacagaactctgcaagaaataattttatatatttgtcattcatatatgcagggttttttttataggatcaagtcctaagattggaattgctgaaatccaagaacaattgcatttgtaagtttgatagctattcctagtgctcctccacaagtcttgaatcaccagcaatgacataacaaaatcttcttgtgttaaaattgtttggccaatatcattagtaaaaaaatgacacctgaggatcttttctatttatattgcccttatgagtacagcttagcatcttttcatatacttagagatcacttagttttctattgatctacaagttttccaaatcctaaggaatgaatgtcaatgaaagtgtttgagactgggacaggtgggagggagataactgggggattggagtctgtctcattctccccattcttattcccatgaaacacaatctaggtagttgtgtcttcctcaggcaaaagctgcttcttaatatccaggaaaagcctgctttctgctggaactcagtgaggttttagggagaaggcagtctgccttctgtgtgcagaggttcacaattagtaagaaaagtgaactgtgagtcaataagcttaataaaatcactttgtctaatgtcctaccaacattttcatgcaatttccaaagagccacctgtgaaaatcttctcaagaaagatgatcacctgagcttgcagatttcatactatatagctctacagagtcttgggagaaaccacaaagccattcaatcatcccctttgagatgggaataaataacaacaatgccacataaatagcgtcagttggctgtgggggcaagctgtcatttccaggagagggatgtggttttctacccaagggtgcagcatatgatcatattaaaaaattccaaagatagcagaattcaaatgtgtcatttttgtcattaagctgcctgcaggtgttccatttagatcagatgacacatttgcaaaaaccagaaggaaaagagtgggcttttgcttaattcattgaatcccagaagaaaatgaacactttttttttcccatgacaaactggaatttgcctcagatgagcttgacatattgccagcctgcggtctgactttgtctgagaacatcactgcactcctccaaagttgccaggatcagaggccaaaaggaaaaagaatggggcttttctaaggctgctggatgatatcttccccacaatccatcttgatgtgtcactgcaagtgtccaggggacaagggtcagagagaaaaacaaaaagggaggcattcttgggcccagaaatgacttctgataagaggaaataagcaagggacatgatagattcaggacacctataaccaacctgaggtggaccagaatttctaagtttttaaccaagaaatattgatttatgtatattatgctttatggcactttagagcaatttataacacttacattaaggaatggatgggccgggagaaaagccaatatgggcatgaaaaaagatgaagtgctgtcaggaatagtgactttcaagtatcaggtgcaatttcttgcttttgcattttatctgaactattttaacattaaacaagaaaatgattagtgattttaagttacacaaacaaaacaaaatgagataaattgaacagacctaaaggaattcttaaaacacacacacgcacacacactctctcaactgttaaagtcagaaaacaaaaataacacccttctatatacacttattttaaaaatgcatttaagttgtgatattatgtaaaatgaggggaccaaagagtatggtataaaatgtgtttttatttcaaatatgagttgtgttaataaaaacaaacaaatgcagcaaaatactgtggttctttgccaagacagtcacttttctttcctaatacattttgatgaatcaggaaagacctcagagacgagagacactttctttgtacatgtcccacaagcacagttccaggattttggcactaagtaaacaaataaaaatatgcaacagacataagagataatagtaatgtgtattgagaaatataattttatatagttgttcctttttcccaagattctttattaatatcaccaatagttattactagaaaacactttcagagctagaaagttgccagaaacatttctaattgactactgttataattaatattttgaaatgctgagacatttgctagggtggacagctccttcaaaacccggccgttatctgacgaaagagcctaggctcaaataagaattaaacacaagttggaagtaaggtgaggcacagtggaatttttttaggatggatatagttttcaataaccttaatttggaatttttcctttgggataatgactttgagtctatagaaatattgtatgcattatagacgaattgattttttaactaaattctgaaaggcttaagtaaaatgatttgatgatcaagtcagatgcatttctaaggaagtgaggatcacattagacagaaagtttgggtttggtgtataataattgaaataaagactctgataagatgtatcaatgtcttgtgtttaatgatctcaggaagtaggaatgatattagcaggcaatgtaacactagcatagagcactgaagacaagattaaatctgacttcatgtaggtgaacaaaaaacatatggaaagcaaaaagctgagtacaaggataaaggaaagaatatgaaggaataaacctcaatagaaattggtttaatttaatttgggaaaaatctgcttcataatagggaaataagtgggaccaaggaagaatatatttcccaatcatctgacatcatgatctttctcagcctaatatctatgctgaattcatgtattgatttagatcatacaatttaggctgaccttcaaagtttggtcctaatctaatcctccagtgatagttccccaaactccccatcattccaagcaattcattctatgtatcctcaaaacacacaagggacctccacatatagtggtatgtattgattggctgagtattagctgatacttgaacacttcttccagcatcagcttcccacttcctcagaccctggatcctagcactctatcacattgttttaagatcccctttgtattcaggcaaccctcttgggtggaggctctttcaggatggctcaagaacagcttcatttgccccatggggaaactgagcctgttattgtaagcgtagctccctttctaggacttgtgtcatcttgctgcaccatgaggaaggcagctttagtgacttctgtcacctttaaatttctcaaacttgtgtctggccccattctttatttctatgcatttccctgggcataagaacacaagtcgaactctctcttcaaagcttagacttggttggaggaggtgggagaatggtgttcagcaactatatatggcagaggctatggggttatccctttctccgcaacaattctcttttcctggttggctccctatgctggcagaaccagtttcactcccataacatgtgctttgcagggagtctgctccttcagcttacttggggatgtgaaagtcaccatttactctcagcctttgatgcctcagacaaaattgagtttaatgttatttgaacatattatttttatataatattagaagtagaaagactctttggagttctctaatgcatctctttccaaaaaaaaaattttattatgttagtccttcaaccttgacttaagtatattaattgcagttgagttcatcactttggagatagccagctttagcaaaataccgcacatggctagattttccttatattaagataccattttttgctataattttgccttatctattttagttctgtcctcaagagcaaacacagaatttttggcataagattgtctcagaacatactgctgtgtaaaggtggctgagtagtcagctgggagaaaatggcaggaatgggaagaagtgactttaactgaatccaggggaagataatggccaagaatcagaatcagatgcaaacacagatatggcaaagactacccatttgcaagcaggaattagggatgaaaggaagattaattttttgtgagtatgtttgtatgtattaatggactgcttagttcagtgtcaataacatgtgaatgtagctgtggatatagagataggaggccatagtagcagcacatctaatggaagtcttcaaaaatgagttaggttgacttacagcattatgtacttgggttggagaggggatacacatagctcaaaaagttaaaaacaaatcagttaaaatattttatatggcaatgtttctttaggcatttaatgaataatcacatcttcctctaacaaaaattaaaaaaggagcttaagggggctgacctggacataatggtggggtgtgagtgacagtcagcattctggaaagccaaaacatttagggaaacagccctgctgtgatcccaagagtatagcaggcggttgaggttaaaaaccaattaatgaggttcaaatggagtgctaaatagcaagaggatttaaagccaaatttggggagctggaacagccagaagattgaggagctggaaataacaggtcaggtggcaaagcctgagagtgttaggcaaatatttgagatgagttcgttatttataatttgattccatgctctttgcaccatgatgtgtgagtgaaccagttagatttaaagggctgtggatggagctcagtgatgaactggcttcactgggtcatttcattcacctgtggcttgaagttatagggacagaaaatgtgtaaaattggagggagtaaccccattgtccttgatatatatgatgctttcctggttggttgctcctacttggtgaagacataaaatgccttgaaacctgatctaatccctcaaagtctgaatttctaggtctgcttcagctctcgtaagaagcagcagtctaggtggccaaaagtagtcttgatcattaaaagtccagctctaacattagtcaactgactttccccagtattatttcctgaagacatcaatcctggaaagggattccctacttcctttaaaatgagaagcctttgtttatgtaaggtagagtacactggcaccacagtaaatatcaacccagtttttaaatgccagaagtttacagatgtgactgggactggggaagcacttccctttcccaaggagattgtttctatcatcaaggtagaaaaatgaagaacaagttaggagtaatcaacagtggaccccaaaaattactgcatatttctaatcatcttcagggacatttcaccaatatttagtccagtattatgcccttgtgttggcaggacaaaatatggcctaggaattccattcaggttcttaaacacacatttcttaggactgggtctggggtgatgctcttgcttgtgtctgaggttcttgtaaggctagattcattaaacagatcaggatttttgtctagacaagtgatgatgagcccttgctctaaggcaccttgcaggaggaaggacaccagcctaatggcattcagagttgttaagggatgtctgggtgtctgcctgccttccatctgatgccctttcagatccagacaaggttgtaggtgccccgaatacccaataattcattcaccagagaagcaagaagaggccatagcacctggataatgagtcttgcttagcttggtctaagggaatggggaagataggaagaagaaaagttctccttcaggaaggtaatgatttttgtggggaaatcgtaaccagtaccatgtggcccaggcagggtccaaagatggttagtctgagtgtggcagtctgggctcaggtcactgagggaggatggctgctttgaagcagtggggcttgtgtgtaaccggtgcatagatggctgatggcagaggtgaggaatgactttggggtgagcagagagaaagcatctgaaaggtggaggagcatcccaccagtttcaaacagtgggggtctagcacacgactgtagctgccaaggaggctgaaagtgatagcgagagttctgcatgagcccctcagtacagaagagaactgacgaaggaaccgggactccagcagcaacactgctggaggtcacagcaaccagagaggacagtggccttttaccatcgggagttatctcagttctttttttttttttttttctgtatataaacttccatgctattagcaggtggatatgtttcattaaaaaaaaaatagtgcttaacctaagcttattagttatctgtcttgttggaacacttagtttatatacaggattttttccatgcctccctcaatagtcctacttgcttctctgttttctcacctttgtactcggagattcattttaggcaagatttcagtttgcgtgaaagaatgccaatctctgtcttcttcgccaagggaagcctggccaaattgctatcagttttgaaaaaccaaagataaatgtatgtgtcttaaaggtctaattgtatcatttccctctttatactttgattactttgacagatgggaccttcacaatatattcattgttcagctggaaaccctgggaagcagtaatctgagctccttgtcctgaggccacttggtggccatctccatccaatgttgtctgtggaccccaacagaggggtaggtaaagagttattaagtcacttgaaattgcttttcgtgcactgaaaagtggttgggccatttcaggccatagcagtgtggcagaatgcccaactgcctacgtcaagcagtgtttataaattagaaattaccagccatttggttctttgctgatcagtcagagtccctggaagactgtgccgacgtgcctggggcagagttgttactggaccaaacaaagcatagctcttggttaatcagtcatgatttgtctacctggcggtgtagattggaatatttggaagagatttggaaatatacatcttttcaattgcagtgctatgtggctaattattccagctaaaagcaacaactaaaacggttttttgttagttttcttgcctagcatagaaaactggctataaaattcaattcagtataatttgctctagatgtatttcactcaactagttaacaaaggtttattaacaggaggtaccgtgtgtcacacatgaagcatgataagactagtcctcccacaccatttttttcttgagtcactacatgaagctatattagtcatttaatatattaaaggattcacttcacaactctaggaggaaggtatggctaatgaccccattttgcagctgaacaaactgaatttcagagaattaagcaagtttcctaagggccccacagctagaaaaccatggagctgtaatcatgaatgcagcagactgaaatcattcttgccttttagttggtgacctcaaccaccccagaatctccttagagtttctgataatctcctgaccaggtccaggtgatccctacaatgctcatcttttcctttctgggcagcctggagcaattctcagcctgtagtaattattgctgaccagctgactcctatccccagaccagcccagcaaccccctgccagtccccctcaaaagccatagtccaggctgaggtcaggccacctttcttagttcctgtctcttgaaaatcagtcctgccatgacttggctgcccacttcacagaacgatggcaggccacgatcattgctttagggtacttggagactgggaagaataaaatgagaggagagaaaatgtttggaccaaaggaaaaatggatagaacgaaacagtaaaatagacttgaaattaaatgcacccaattgaacatatatgcttatctcccaaaatcccccaaatggtaagaacatagagacaaagagcagacaaaacagcagatgagtcatcaccaaatggtaactcacacagatttgaactttctgggaatgtacacgcctaatgaaaagaagccaaaaacagaccacaaaaccttgaaaacactcagggactagaagcaccaggtagctcagaaagaggagtgtgggaggctgctgacccagatgaatggaatgaaacattgtagggaacagttatatcctcagatgccttctctcatcccacaaagctgagcagctgtccgtccttgactctgggagaaaggcgttatcatcaagatttccataagtggacagaagacacactgaccatgaaaggaaggccagcactgggtgatcattttcattctaaatggtgagacatctgatccactctttctctttccttcccctggaagattcagattgaaggatgctagctttatatcctgactggcaggagaatggaggaccaactttagcagaatttattagtcctagagaaaacagttgcagacaacaaggctggtctctcgtagcttactaccagttctcaaagccatactctgaagtggagtaacatccaattatttgagacatgcggctattattaaataaaaaatccaaaacagaaaaaaatgaacttacatgaaacaggataaatgaaaaaataaactttaaaactttaattaatttaatcagatagttaagaagttgcattttttaaacaacagaagataatttaggacatctcttgagtaggaggataactattcaaaagaaactgaaattgaaaataagtgagaaaaggtaagaaaattagagagtcaaatctgatatccaacagacagatcgtaggagcactataaattgagaagatagaaaatgaagggtaggaaataggaaataataaaagaaaattttatagcactccagacacgagttttaagatagttcttgcatatagctagagcttgataaatgtctgcagcacaaattctaaagagtttacttgcaggcattgcagtgaatgaaaagaatcctcagtgggaaagcctgagacaatgagagtaccttaaaagcttgcagagaaagattagcattaaaatggcttcggaattactgatagcctccctggaagctagaattcagtggagaaaacctgtgaaatttgagggaacataattaacaacacaaaatcctatatcaatccaaattataaatcaattatgtgggtaaaataaagacatctttagacatgcagaaaaatttcaaaacaatcatccatccctccgcctattcccaggcatgctgactttcctgggaggatactgatgtatgtgttcccaaaatcaaagcctccaaatcaaaaaagacaaatgattcaggaactgggacccaacagggaagaaaagctaagggaattcccaggatgaagatgaaggaaagtcccaggaaaataactacactgaggccagcagagcaatcagttcagatcagaatagaaaccagatggttccaggaggggtatcaccaagaaaaccataaaaccagtctgaatgactacatttataaggcttacagttcagtcagacagattatagacacattaattatagacacaagcaaataaatgaggcaattattaaatccaggaaaaataaaaagttatacaagaaaagaaatattagcatgttttctacaagacttgatataaacaaaaatctaacttaaacataaccacgcagacaccaaatcttgactttaagatgtaccaaggaactaccatggaaggataaagtatgtgtgttagcattggcgtaagacagctaaatcctagtctttgttagaaggaagtaaaaagacaacttacaaaattgaaaaagctctaaaagcaatagatgcattttatttggaaacatgaagttaaagggcagaagagacaagcaagcaaagcaataaaaaatgaccaatctgaggcacaggactagtgggtaagaagtttggagtaaggcactattctttttacttaaaggagttgtgtcacttggctttctaaacaaggcccataattggaaataaaagacaaggaagaaagacaaaaaagaaaaaaagaacaagagaggaagaggcagggacggagagagaaaggtgaaggaatggaaagggagggaaggaatataacatatcactagaaaagtattcagtgaactggtactggatgctttgcgttctcagtggatgaaggaacggctatgccaggacaatcagggcaggatcttataaaggaggtgaaactgaaaggacaggtatggtttagacaagtggtgaggactgtggaggggagggtttatgtaacccaaaggcaccatatgaagtagtcactaaggtaggtttacaggcagtgtgtttaaggcctctaggagtccatagaatgatacctttgctggggcccagtcctccaaagtatggcactgcagcatgctgagcactttgaactacaggaaattaaaaggccttagaagcagactcagaaacagggactttctgatcttctcgtttctcctcctcaccaaggacagatagatagaaagtatatctattacagagagagcttctctctggaagttctctagtatggctgtagaaacttcttccaaaagaaacgcaattatcttaaaaccccctccctaggaatctcatcaaataagcaaagaagattaagcgcagagaaaagacaatgctgtcaccatgcccatgccaaacacttttcatctattcttctgagactagctctgagaagttacctgggagattttacctatgtaagaagacaacctttgctcactgtggagttctgtccctcacttttctgcaatttgttggaacatccttcagagatcagagaagctttgttctaggacattggctgttcttgggactcattcaatctccctgaaagtcacttactaccccttaaaattacctacatttctcatttctctcttccctatgaagagagtatttaagcttcaaccaccttgcccttctttgagtttcatattttgtatggttcccgtaaacacttacatgttaataaatttgtgtgcttttcctcttgtaaatccattgtcagtttattttagcagacttgaaacttcagagggggaggaaaaaattcccatcatccctacaacttcgtttgaaatgaaaagacatctctaagatttggtagttttttaagctgggtaatggtatagggcagctctatctttacgatgttaaaattttgctagttaaaaaaacaaaaaactaaatggtacattcttgaagtagatgcaggcccaccccataggcaaaagacttgtgaacagatgatgggcatgtgcagatttgaatggtatcgcttcttcctgggggacataataccatttgccaggacacatgagttggtaagcagagtgtgagcagaatttcagtcttctcttaatcccttggcggagtaatctcaaagtccctgttttgggtccgtgattcatgccctcctgagcctgaccgtggaaggatcagaaagcatagccagcgagtaagcaacaacggggatgtatctgcccattcccttcctgctacgagctttcggacataacacagaattgagctgtcagagaagaggaggactaaataggcatgggtctggagttctgattatgactctgtactagatatttcagttgataaaatgagatcttatttgtaactcagagtgactggatgaatttttattgtgtgaattcttgagatttaatccaagcagtaggaaaagacgagtttgcaggcaggtttaagtgggcaaatgggcactgaacacaaaatcaaagttattttctgtgtctagctggtgcattaaaataattgtgaaatgattctattatgttaatgaaagtgtatctattactatcagttagatcgaaaacagataaatcagacactgtctattactgtatctgctagacattatgccttaatacttcaatattagccagagtaatagttccacaatcccacatgcctagagagcaattcagaagaggctacaaaaatttaacatgataaatagtgaatgtcaaataattttgtaatggtatcaaatcactttgacagacttaactttattttgagtttatctcaatctagtttcacttaagttgaaaagtagtttgttttctacattgggatgtttcaaatacatatatacatgcatttttagaatacctgtagtttcaaaaatacctcagaaacggaatgagctttggaatttccatcaccttctgacaatggtgcatagaaccctgtatggttttcgtttttctaatactctttattgaaatataatttacataccataaaatttagcaaattgaatgggtttaatgaattctgagagttctgtaaccatcttcatcatcttggtttagaacatttcatcactcccccaaataatcccctctttattaacagttaatctgattttccctcttccaccccgccagccctagttatcccaatcaacattctgtcactatagatatgcctcttacgaactttcatataaattgaatcacacaatatgtaatctttggtaatttgttcctttcacttagcttgatgttttcaaggttcggccttgttatagcatgtgtcggtacttcattctttttaagtgccaaataatattctgctgtgtgggtataccctattttcatcagttgatggacgtttgcgctatttccatattgtggctattatgaatatgctgctataacatttttcacatgtttattgtgtggatgtatattttcatttctctcgggcatatacccagaagtgaaatttctaggtcatagtggagttaaacaagatacctctatgcctccatgtgtaaccttatgaggtacatccaaactgttttccaaagtggctgtaccattttccatttcttccagcaatgtgtgagggtttcaatttttctatatcctcaacaatagttgttattgttcttttctttctttctttttaaaatatagccatcctagtaggtgtagagtggttcctcatatacttttaattttcacagttttttttttgagacagagtctcgctctgtcacccaggctggagtgcaatggcacaatttcagcttactgcaacctccacctctcgggttcaagtgattcattctcctgcctcagcctgctgagtagctgggattacaggttcatgccaccacacctggctaattttttatatttttggtagagacgagatttcaccatgttggacaggctggtcttgaactcctgacctcaagtgatccacctgcctcagcctcccaaaatgctgggattacaggtgtgagccaccatgcctggccaattttcacattcttaatgactaacaatgttgagcattttttaaatgttctggttggccatttctatattttctttggagaaatgtttattcaaatcctttgtccatttgaaaattgaattatttggcattttattattgagttgtaggagttattataacagttataacaatctatatatcaatctcttatacacatattatttacaaatattttctccattctatgggttgtcatttcactttcttgatagtatcatttgcaacacaaaagcttttactttcaatgtagttcagtttatcttttgttgcttattcctataaaggcagggggatgctggagatgttcaatgctaaataaaatgtagtttatgacctaaatgcatgtatatgacaagagatgccatcactggtatgataaaaccataaagaatattctgtgcagagttgatcatttcttttaaggccagttttcccaccttcttggcttggctaacactatacctctttcaagtttcagatgagacagaatttttctagaaagccctatgtgctttctctcaccatctcataatgtcatcttgaagtagtatcattactaacccaatcttaacagatgaggaagctgaggctcaaaaatggcaaaaaattttcccaaatttatacaagcaatttattgtggggtgaatatttcaaaccaagtctatcttcaaagccagtgaagattttggtcttatttactatcttggtaatgggtttataaccaggtgattatttctgaaaggagatgataaccctttaaactgtacatcacatatcatttcagctgcaaaaaattaaaaatgtgattattcaagttcataaattatattttacgcataatcaatttaacggtagaagcttttcaggaggctcattgggaaatcataatgaaagtgagacaagaattgtcttttggtctacgtatattctgaatgagtgccccaaagaagagagcttcaccttgcaactctcaccactcttctcagagggtgtgtgtcagagaattaagtatactgaggttgcacattgacacaacacactttgaagaggatggtgacttttattatagataagaggcaaatattgggaaatagaaacatgtctctgaaagtgaaattcaaaggcaaaagaagattgtatattaactgtacttatatttgaaaatataaagcatgaaatatataaaaatataaaagatatgtcataatttttaaagatatgaatatagctgtatgaatatcataagcaagaaaagaagttctatttgtgagtcgaccctctcaaaatgagattgatgatgaatgccatgttacttcaattgttaagtattcttctgctatgtcataatgataaaaatgtcacaaccatttaattattaatttctcatacgatgggtaagttagattcagaaaatgaactcttgtgcaatatgaactcattctacctcaccaagaagctataagaaaaggctttttgtaagcctcatacatcctgtgcatagcatacaggatctaatgtaaacttcacaataattctgcaaggcaagaaggattgtccctcttttgcagattcagaaactggggctcagaaggatcttagaagtggctccatgttcacagctggttagctggcaaagagagattcaagattttcaaattcaagattttcaaatctttcaaaaagagattttaaatagtgccccattacccatgctttttctactaggctgtacccagtctcaaaattcctggcttccagccgttcacttaagatactggtttaagctgcctgtagataagaagataatgtgttaagacactgaacgctgacatagagattttagtcctcttcagtaagaatcaatttttcaaaatctggagcaaactcaaaagctccatttttggatgatactagtataatcaccaaaattgagtcatcccttaaacagtaataatttgcacaatagtaaactccctttgttctgatggccagtatttcttaggggtaatacttcaccctgcattcattgagaggccatgtggcatctctgtgacttttgacaccaagatctgacctttctgtgggccatccagggcttagccactgacatcaaccactccttttactataccatttcatgttctgtggctcttaaacaagaacagatagcatgatgtcctctgttaaaaacctaagaaatcaaattatcctgttattaaacttgtcctgacataagttacatgtttttggtgtgatagatgtgtgtatggcgacagaaagccaagcatagcttgcagtttcctgaaaggatctgcagaaaaactgaaatctgggagtcattttgaagtcaagactgtggccataaatgtactattatttcactcagtggaactgagcaccttcctcaggagagtcctaaacagaaacgggaggacaggaagtgagccagatactattctgagcttcacacttcccaaagtcctccaggaagaatctcagccattacgacatcattgtctcttgggacctccacaattaggtactttcctgagaaaacatccatgattccttgttttcctgctttttctgtttcttactatggtcctttgtacatgtgtttccccattcttctgcattaaatgaagcttttgaaaacagacaatgagatgtcttgtctttctctacagcacctcttcccacttcccccttcccccagtcccacctgggcatccattgctggtaggtaggagagaaactgacctgcaatattaaaggtgaaccaaagccctagatatcccaaaagggagctctgaagagggaattacctgtcaggtttccccatgtagcagggtcttctttttccctcacacacacctttgcttatcgctggatgcaggtgccctggagtgggtgggacctcaggagaggtaggctgcactctgtagctgaggtcaacctcaagggggcactggttggaggctgtctgctgaccacatgccctgaagctgggcaccacatctctccctacaggaggatctgggtgggacatctaggtgaccaacacacttcccatgttactccacaaaaatgttcttccttaccatacacatattgatgatggctactaaaatatcaccttccagatattaattttaatgcaaacatttctgagaagtaaccctttaagctggtacccactatcaatttcttggtgaaacagcttcctttctttcccatgagaaagttttaaaaggaacaagaaggcattaggtacagcagccaaagagcatggtgcatttgggtgtgtgggggcatcaaccaatgccactccttagtgtggggccattacattagtgtaatgtgttttgtgttgctataaaggaatagctgagactggttagtttaagaagaaaaggggtttatttagctcatggttctgcaggcgatatatgcatggcaccagcattagcttggcttctggtgaagccccaggaagcttttacttatggcagaagatgaagagggagcaggtgtgtcatccagcaagagagggagcaagagagaggaggaggtgccaggctgctttaaacaatcagctcttgagtaaactaatagagtgagaactcactcattgccgtggggaggtcaccaggccattcatgagggatccacccccatgatccaaataccttccactaggccccgcctctaacactggggatcacgtttccacatgagattcggaggggacaaacatccaaaccatatcagcaatctcctcactttacagatgaggagaccaaggttccaagaagtgaggtggcccaggcagagccctccaactggtgaggacggaacacagtctcctcctctgagctcttcccttttgcctcttctcatgcaagcatacagagaactggaggggctttgccagcacagacagggtatttgtttttaaagtataaaatagtgcctctgcctcagaagagtcatttggtcttcactcataaacagaatagagctctagtgctgggagtgaactcattgctatgcgtgtgtggacagtgaggaataatggtttactagtgtgggaaaaacacaaaaacaagatctctctaatctctctaaatcttatttcttcatagctcaggtggggataatgaatcctgcttgcttatttcccagtgtggctgtgaaactttaggaagaataagctagtcagtatttagtatagtattatttaacagcaagcaagcacttatttcaaaaatccttttagacctgctgataatttgaaatattcaagaagtgggactgcctgggttctggacaatctcaatgaagtccagctgtaaactctggtctagctgtaccattagggcctactgggtgaaaaccagacttacctttaagattctagtccccaacacatatggcctcttcgatatgatttttgagatgtgtttgtcttactgaagtccactgggctaagaaattactttgggctactgtgcagcaatgctttgtgtttgcctattagattccatttttaaagggcaattcctatctattgggctcttactaagtgatattctctccagtgttatagatcccattttctattaagcatctaatatacatcagatacttataggtttaaaattatttttagcatacaacaatgtgaaacaaaatgatgctctaataaagacgacaacaacaaaagcaatggcaacaacaacaaaacaacagcaacagcaacaacaaaaccatcaggttctatgtaaagcaggtggcaagaagaaatggcattaaaatagcgcagggccaaggaatctcaagagaggccctgacaattggcactgaatgttgattcttcagtaattacggagctcagtgacctgagaagaattggtggtgagcaagcttgcctcagctatgcttcccacccccgtgtttgtgccagctgggggcccagggctggtttaaattctagcaagactctcataccagtgcaaacatttacaaaatactgggtgtttatcttggcctcgaagaaaggtaagcatcttttggagttcacctgacattaaaaacatatttaaacttggggtattggcctgttgaaattgtcctatatggatgtatttgtgatgatttaggatgattttataatagtaattccccacccttaacattctgtatattcgccaacatttattgaatgggaactaggatggggaggtggaacacctcaaaggccaagtctgacattatgcatcccataatagtagtactgcagtgctcaggactgaactgcaaggaattattatcatactgtttttcctgtaaaacagtgatgtatatgaaatactgagagtagggctacgcagtgacttgctttttcagtggtgctagattcttctattctctcctgacctctcactgagaacactgaaaaaggttaagaggccaaagagtagctacagagagaaaatacattgctctgtcctcattaacacagtgctcaaaccaagtgaggcaaaaggtttagagaaacaatttccctttcaatgcccaagtaatgttaatctgtaaaaattatctatgtactttgtgccaaataaggtaaacaataaaagtagagagctatttcctttacactaaaagatgaaaagtagcaaattggtcgagagggagaaaattggatggaagttcaaacttttcctctgcaagtttgataacggaatctgccaaagtaaactggcaatagaaagattaatgggagaaaagttaaacaaatttataatgcataagtgcatgggagtcacataaggtataaaactcaagggctagaaggttgaagattaaatgtcctctttataggaaagaggaaagtagtagatataggcaattgtagtagaagagaaaatgatttctagaggagattaatgggtctgaagaacaaacagttgcctgggataattttcctccaggctctgggtacatggttacaatttacagaaaggtaaggggcaggactgcactgtgaacagaggttgtcttattatggagataaagtccctcaggtaacagttctcataggaatagataaaaagcctgtttgggtgggtgtggtcatggtcttagtttccttttccatgattaatattccctggttagtgaggggaacaggggatcgaaggcaattgtgttttttggaagaacttcccttagtcagataagaaaacttcagagagagctcctgcctgtgcttggagggagaaattaagggagggccagagaaacttcaattctggggcagcttctaagtccttccaacttcctttaatacaaagtgctcagcatgcaaaagtgccgtaccttggggtatcattttctgttgactagcccaaaagaatgaagcttaaaaaaaaaagagaatctccaaatttttctaatttataaaaattgaatgaatgtggcattgaatgtgtatatataatcacttttactttcaggagtatcttccaactctgaaattctatgattctaagacacattctatgtaatatctttccttgaaaagatgtattttctctctgatacctaaaatcctttcctttggatagagaaaggattttcttccttttatatacatgcattcaccacaaattaatcaagcagaatattgctggtacttaaaaacaaataagctgtagctcctgtcctcaaagagcttacagtctaggcaaagataagtcattaattcattaatagaccttactgaaaattttgcaagtggaagttcactttctagttttctctgtcacactaagatgagatatcacaaagagctacaaagaatcaggctcaattttcatccatagactaaacatatttcatttcagtgatgatatatttctatgatgtgttttgatgaatacagctatcattacatagggctccttgagaactctgaatgttcaaaaataggaattagcactacaataaaaagtatatataggtatttttggcagagtatatactgtaatcagtaaaacataaaatggctttaaaaatatgtaagatatgtttacagggatttaaaacagagtgtcttaaccattttaaagtaatatagtgctaaagtgcatgctgagtaattccaggaggtcttctttttttttttttttttttttggtggttgtataatttaaatgattcttaattttaaaatgcatttttggccaagacatttaatgttgaaaagtgcctattcagcatgcaagagaccataagtgtttttcataagaatttttattataaagctacatgaattttaaaaatagttatttacacaaaagggcctaatggctccaatagtttaacagatcaataatcaatgttcttaaaagtcacttaattcaaatttatgtaatctgcattacgaaaagatcttatatacatatttacagcataactcctagtgatttctttataactatctctgtccctaatgtcatcttatgctcctttatgatagaaatatttttaagaccaacactttgaaaatatcaaaagatattattgcataaacaaatacactggaagtcacctaaggctgtgacaatgcctctataataaagatatttagttgtcttcctttttgtgattttcctaattgtgaatagaagaaaattcaaagaaaattacagaagagtttacaataaaagattcctagtatcttaaatgtctgccaaaacaacttatatggcttttgttagttgtcatattgaagaggaaattaaagacaccatagcaacccaaaattttccaagaatctgtggacatatgagtctgctgtgtgcttttcaatatttacagagtcaactataagctatcatggttttataaagctggtagtagtccaatcccacatacatgtcaagtgcctttgggaacaacaaataactcattagacctgtccccaagtctccagtttataatcctcttcagattatgtgttgtcctttgggttttgaaaaaaaccacataacaaaacctacttcttttccaggcccaagtttgtgatgctttcttacttctccaagttcacctcgctagtaacagtactatttcctcaaaattaaacccagaggcagtttgatgcagacaacttctttgagtttcccataaccaaaaaatatatattgacatttgtgctggactgcaataaatgcatgccctgctgtgcccaccctgatcctgttcacaggaaacccctgacaaacaactccaagccttagaaaatctctcgtttctggttatagtctcttaaaggattgtataaaacttagaatattttatctggcttttccctttcttcagggaaaaaaaaaaatctccagtgaatgatatcacttacacaaaaagaacaaaatgcattttttttttttattttttaatgactttcttttaacctacccaaactgcatgctaagcccaaactttgtaattcatggtcttagaaatgttatgttatcagttccctgtccctttcatgggctgccccctttctactctttcaagagcctggtaagtcatatgattgactttcaaaccaagactggttgatgtgagtaaaggaaattgaattggaatacaatcaccccctactgctctgaacagttttttgtgcatctaaatatgatctgaatttcagatatggttttctatttgacattgattttcctccagcttatatgtgctacatctttacctaaattgagttgttatcttcttctgcctttttgaacttcacactataaattaactattatcctactgaaataaattcctttgcagattttatgtatatggaaggaatttcaatttcatttgaggatacacattgagttattatgtcctatagagtaatttattgatctttgggaacaaaaacctccagtatagtatcagaagaattttactgttaatttttaaaataatacttcaaaattcactcttaagggaatatatgctcactcatatcagtaaaataaggaatcagttggatatgagaggataaaaatctgatattcaaaatatgttcttactcattttaaaataaagagatctattaacaaaatacagtgaattttgatagcttatgagactgtcgttttgactagaaatggtttagaaaattaatctatttgttcctctccagcttccattataaatcatttcttctgtcacctcaaagttaaataatagtctacattggaattaatggatccaaaacaaagcaatcattaacaattaagtagatttagattaaaaaaataaaaataaatcctcattccaggagataaaagaagtatatgtgcctttaaattaataatggcacaaaagtattggtgatatctagactccttctcaaggagcaacaggaaatttcattgaaatcagccagaattacaatatgtctcactctggaggtgaaaaggagacaaagttgtagttatgtaaagaaccatagagaaatttactcagacaacccatgaaacattcattttttaaaaactgcacaaaactgaaatcttctacatcttttctgctcttagagtttgctgtgttacttttggaatttatactaatctagaaatcatggccatgtttggggccttaggtatcaaaagacctggggattccgttaggggaacctagatatgagtaattctttcctactgttcttgtgtgcacgtttctgttgcttaacaaaacacatgctgaaaaaccatacttggtcaagaggtagatttatgactgtttaggaatctaccacatggagcatggggcctttgtggttaaatacaactgaatgacaataaggcagtatcacaaagcaggaaacaggccttggctctcttcaattttaggttattgggatttggagagggaaacttatgcctcctgccagacatgatttttaaacatttttaacttggtttcccgttatcactttaaagcactttgtgcatgaagggtgacatttatgtggcaagttatattttattattaggtgaaaatttttttgaacaagtgaaaacatttgtctttaatagtgattaaatgcccaacaagttagaacctttacagagaacaaaatgagctaagtgcaaaaataagtttctaatgttgcttctaaaaataaaaaaataacaaatgaataaaggagataaatgcaccagggatttccaaattggaaactcaaaacatttttaaagctaatttaataatttatttttaaaaccctacaaaataacagaatgaagatattccctccaatgtaaggtatgcagttattaaaatactgatcaattatttgcttttgttgttttcctgttaaagtttcctttcgttgactgtttttaccctggcagcacatctactctgcatacatctctgtttattaatcaatgcaataccctctcttcagttcagtacaggacccatgaaatattttaaacttgctcctttattgggttaaacctatttgaatggaaagaaattagccattacaattctgagagatcatgtctgcacacagcaaatcacaagaaacattctttggggtcacttttgaggtttccttctaagtctttgaagcatatcattggttacaaaaggaaaaaagactaaattttcagtattaggcagagaaaaaaaaattttatgaagcaaatattcatgcagaatgtattgataaaacttgggagtacacatgtagccattccataagtaccccacttttttttttatttgtgttcttggttacattaattaaatgagcttaatctcatactctaattattatctctacagtttgttttgtagcaaaaaaaaaaaaaaaaaactcaaaaaacacaaacaaaaacaaaaacaaaccctaatgtaggagtttaaatgtgttattttttgagaaatatgaaattcgtctttggcattagcttcaactttcatcctagagtagttaatgggcctaaatctaattatttgtaaagtttgcttggatgattggtagatgataaagcaatatacactaattagccacaaggacaacgacatgagagatgaattttacagatacatcaaaaacttatctgtgaatggaattttagaatgctttaaatagagctataaaaataggtgaaacaagttgatttaagttggagttctttattattcatggaactataggaatttttttttcttgtggtacttagaagtttcagtgtgttataaagattttttcttctaccagattgcatcttccttgaaggccagacccatgtctgattcatattatctccatgtgtctagtagatttctctctataaattagctatcaaatatttgttgaatgcagaacccatatgccatccttttgcaaattagaaataaaagcatgcattctccagaacgtgtttcttaaagcacctgcctctcttgtgtcctttttgaaattaatcacatgaattcagaaatgagaagggatagttttatgttaggtcttttgtaggaaagtaatgcactgtgtcaaagtttcttaaattcaggcttaaccactggactgaatcataagtacaaaatgtgccatgggattaaaggtcttattttttactgtactaaaaaataaataacagtttggtaaaatggtgtaattatagtttcttctagtatttggatattaaattagagggtaccataattcaggaatgatggccttttctttatctgaatgtgtctagatagagggccctgtgttttgctgaagactgtaattgttagtgtacttataataattctctagtcactcatcatcagcacctaaacagcttgccttggaaagttatgaaatcccggagttaatgaccacgcttaaattttggccaagcaatctaaactcttatcctcaattttccacagcagttggatccattctagaggtaaataccttagagaagagaattgactaggagcaaaatacatgcaaatatatgttatataaagagcatgataattcctcgctttactattttttaaatggaaatatactttgtctcagatgtcacaaattagtgaaatactttgagagaaatataattttaaatatctctaaattcttatagataaatgtcctctaatttgtttctgaaatgccaaatctaacttaagcaatttatgaccactattttatcagtgcttaaatttaattttccttcttcatagttagtacccactgtacacatttctatattaatatacatacatatttaaattaatgtaacattaaatctataagcataaccaagttaattataactatgtgataaaatatgcaaattattttttagacagtgactctttcaaatatccaactgaattatataaataaaacatgaatgacaaattttttagttgtttgtcacatattacaaccattctatatgttattcattttccaaatataaaagagttaccattactagatggaaaattatattcagaaatgcagacatgtccttggtaggaaaaagatagaaacgcacaacgagcttcactcactaaaccaaatttcttaaatttcaaaaagacccattattcacaggtcaaatttgtcccttgatcagtatacagaaaacaataaggtttagtcataaacagtaaagcagcatgtctggaaggaaagagactagaaatgaaacaaaatgagatatgggccgtctaaggctaccccagtcctcactttcaccccccttcacctagacgagtacatgctgaacaagcaccaaaaacaaccaataaatgaaaggaaactcaaaggtcacttggggtcattattttcacatacctttgaataatgagagcatcacatgtcagccagaggagaacaaaatgtcacattctccagctaaaggttggccttggtcaaaggtcacagaagggaggccaggaaataacctaagaggttaggctgggtgcacaaagaaaggtcaccaaatgtcaatgaaagcatgcagctgtttggagatgaaacaactgaggcacccttttgtgctgacatcggctagaaaaaatgtctctgctgacattttttttagctggcagttttataggacattgacattaatgtacccaaccccgaattagccttttaaaaagcaacagtttggaagttaagtgcagcagtttccaaaaaatcataactgtgacatttttattccagatgattaatacagcaatggacttctaacacaaaatttagatttgatctgagctctttcatcacgacaatgtgttagcaactaggcctcgggacacaggtaacaatcagtaactagtatttttatgtttttaagaattattattattcctttaactaaaaggtattcagaaacctcaccttattacaaggtaggaagacatgagtgatttccacatttcactgggcctagctgttggcagctcttgatctagtaataaaatccattcaaaggaaagagaaaagactgaaaaatttgcaaccccattttaaaggaattcatgcaaaatacttgcagactaaatcttaatctatctgagtatttccatcttaaacatcagccctaaaagtaacaattcttagagaagtggtggtagtgttcccaagtattctcagacatcaaactctacaggaaagaagtttagaaaagataggcaccttgaattattcatatacttaacttacagttgatccttcctagcagcttcagttttctgtgtgtatggaggtctattttatacacacacacctgatattcatccaagattagcagctgtttccagataacattagaacatttcacatctataaacatcctttactgattcacaggcacaagaccatattttaattcaagacatacttttcagtcctcagggttctgacaagtggccccaatttacaacttaggcagctccaattttttcccaaatctttttcaaacagtttccacatcctcttaaaaaagagaacattgtggatttatacaacaaaaataataataataaaagttggctgggtgtggtggctcatgcctggaatccttgcactttgggaggccgaggcgggtggatcacctgaggtcaggtgttcgagaccagcctgcccaacctgatgaaaccccgtctctactaaaaatacgaaaaattagccgggcatggtggcgggtgcctgtaatcccagctattcaggaggctgaggcagaagaattgcttgaactcgggaggcagaggttgcagtgagccaagattgcaccactgcactccagcctgggcaacaagagtaaaattccacctcaaaaaaaaaaagtttacacagaaacaaaactctaaagtttatttcacaaacaggggccatctctccctaaaacctctattccgggtgagtctcttttttgtttgttcctccgtaaacttccagggagactgccaaacagtaatgctcaccccggggtgactgcaggactcacccagagacaaaactaccttcctacctaatgggccctagacatatgaagcctgtcaggagaacatcataaatcatggagatgggaagagagggggcaggaggagccacacaaaccctttgcacttaggagaaagagttatttaacacgtcagggaagtgcatttaataaatgaagtcagtgacttgaacatgtcatattcgatctatatggaggttactgaactttctttaaaaagtcatttttatgctggttgcttttcttatgaaattttctacacctctagtgtataaaatggatgtgtaagcagctgattgagaaatagctaaggtcaaagttaataaggaaagcagaaggtctaaaagcaggctgccttttttttcccctttgagttcaagagactccatatgatttgggcatgacatactaatgtttctgacatcaggcctttttttaaatctgccttcaaataactgatacttgggtggtaatgaatgtggaagatgtctcgttgctggaattacaaaaatgaactttcctcttctgatttcattcatgggctagtttttatgagtaaaatgatatcaaagacttggagggatggaatattgcctcaaaatgtcaagacaatataagttacagaatgtacaagttggagaagaaagaaaagggtgggaacatagaattaggtgtccctttaaaaacaaagaagaaagcaaaatactcagcaagtatataaacaagtacaaactgcacatctattttggaaaatgtttttgtatctccaggctttctggatcccttacatttaagtcatgagaatctctgggttattttgtcacataaaagagtataaaacccccatcaaatcaacaaataggtttgctccctcagatgagatttaactgaaacttggaacaaaaacagtgaggttcatcagataaacatatgccaaatttaagacttctatctgttcttaaatggatgctatagattgtctgcaagaactactcccttcaacttcagatgtgataaagcttgatatgatgctcttagaccttgaaacagaaaccatatgtggcaataaacaaacaaacaaaatccctggatactgcaaaggaaaaaaaaacagaaaacttactcgattttagaagacttgaaaaagttgtaattatcttccttgatgtacacggtgttcactgacaggaaaaaaaaaagaaatctcagcacctaaaaacttatatatttgcacatttatgttcaaattattctctaaatggcttgaaataattgcctcttctgctttgtattaactaaacttttttttttttttttttgtcaagtcatggttctttttctagtatctgaaaatgtgccaaactaaatgtcagtgccttcataaggaagatttagagttccttttggagcagatagaagcctcaaatgacaaacacgcttatcctgaatgcccctcctgctggtgtgacttacctcagaacaaggtcaaagaagccgccagagaagatctacgatttgtttgacttgacattccctggtatttccctttgttatccctgtgtcatcgttctgtggcagagggagagcaaggcaagcgcttgctttcaggtatatctggctagtagccctacataccacagagagctactgtggatttcactgtatgaaaagcctccatttgacttgaatgctgttaaagcattgcaggggtaagttttgaaatccttccttaggtcaaactctagctggaaagttcgccccatcctcctcttggaaggactcttatatggccttgtagctaaacttgagcaaccacacactgcagcagagcagctggcatggcccaagccaggtgggtggtccaggcaaggcccagtccccttgtgtccattattgctaaggtgcatctaggagcacaaggacaggaggagtcagacatgtgagtgtttttgcaatcagtcaacaaacatccactgtttaccgattacaggacatttcttctgggcattgggaataccaagtgacaaagtcatgcttttaattttcaaggtgtttaatagagaataagccagggttggaacactctaccccggaagtccctgctattaaatctggctttgcttttcagtaatcacctccttaaagacccaggggacaaaaaacttagaaacaatttcctccctccctgacttactttgtctctgacttcggcctttcacagtggcacacatggttgggacatctaaaataccactggaaaatttaaggatataatctacctatattatatgaatagcacaaatttattttcaatgaattagcagaagttcagagccattctttcttaggcactttcctatactcttggtgaattcgtctagtatgtgaaaaaagagtttctctcagattgttagtcccagctacaaggcctgccaccatagaaaagttccttctctgtcctttttctcctctcttcagatcccctttcttgacctttctatcacagcatctgaacctgcctgcacctgctcattgtccatttgaattgcttctctgctggaggtattcctggggcccactctggcctactgcctttgggcttcacctgacctagctctgcatttacaaagcaagcccaacagatttccaccatacatttcaaacaccgagaatgacactgattttgaaactcagctacactgcatagaggaactccctgaatacacccaatcacccaatttagggaagtacgaattttctgacaatgtgaaagggaaatgacctattttaaactaaagtattgaaaatttctaattattctcattccaagggaaaaaaatgaaaaaaaaaaaaatcctaaagaaaaagaacaattccctcctataacctatcccttaaaggaatggacaatacttgggtaatgatgttcaacttatgcataagaagacaaaagggcatttttttctgtatggcttctttgccagagaccctttggtaatgtgaggtttttctaaaggcataagggacgatttctctatgtagttttgcaaggtccctttcattccttctgacatcttactttatccttttcctttttctctccctaaatgaaatggatgtctatgtacatatatattttctgaaatacaaatgtagaatggcatgtaagtaccataaacctgagatttaatttaaatgcaatatgtaagcaaggcctgttaggtcctgggtcccagtaagaaatgggattcacccttaaaatggtttaagtgaagatatgttaacggtagcactccaaaaaggcataggcagagttttaggagcaaataaataatttacccagggactagcaacattacaacctcttgggctgaagggacaatgagaagaaataatgttaacagaacccagcgagaactggaagcacagaggaggggccgcccagttggagctgtagttttggagaaatgcagcagctgcccaagacgtggtgctgaagccacagggcagcagagaagaaataccctggctttacttccttgcaactcagtcagctcctgccagtacatcctgtggcaaaatatcagctgtaacctgtcagtaaaaagattcagtggggttagcttcctgatacacagcagggaaaacatgggttgccaaggaatttggtatggagactaaggaataatttgcacaaaatttcccatttaaatatgagagaattagagtgaattcaatcatcgggtttataactaactttcaggaatttaaaaaatgtggaaggatgatgctatggattgaaatatgtcctccctaaattcatatgttgaaactccaatccccagtataaaacgcagcaagaagggggccatcagcaggccaggaagagagccctcacaaaaaacggaatcagccagcaccttgatctcggacttcccagcctccagcatcatgaaaaaataaagatttgttgtttaagtcacccagtctatcatattttgttatggcagcccaagcaaacctatgcagccgggtcaagtattttatatatatattataggagaatacatgctttgagtcatatagaacaggatattaacaccaactctaaattgctatttgtagatttggggaaacactccaaacttcagttttctaaattaaataagtacagtattttcttcattattgggctttttttttttttttttttttttgagatggatttttgctcttgttgcccaggctggagtgcaatggcacaatctcggctcactgcaacctctgcctcccgggttcaagcgactctcctgcctcagcctcccaactagctgggattatgggcatgaaccaccatgccttgctaattttgtatttttagtagagatgtggtttctccatgttagtcaggctggtcttgaactcccaatctcaggtcatctgcccgtctcagcctcctaaagtgctgggattacagggtgagccaccctgcccagcattattattgggctttttaaaagcatcacatttcttcttgtatattttctttttttaatgaagtacagtctttacaatagcctttagtgaagatttgctcctaaaaacttagcttttgtttatctgatgatggctttatttcaagtagtttcacctagtatataattatttgatagtcattttctcttgactctttgaagacatttttcatcatcttctggcttccattgtagctgctttcattcctttgtagttatttcatatttgctttgtttttggtgagctgaaatttcactaaggtgtgttcaggtgtgtgttttttttgttgctacctacttatatttcactgaggtcttctgatgtaatctagtctgccaccaatattgggaagcctttagccattttttttcctatactgacttttctccattctctatattctcttgtgaaattctaagcaataagccagaccttctaactttactgtaatgtcccttaacctctatttcatgttttccaaatatttacccatgttatattgagtcatttcttctgctgtattttccagttgtaaattctctcctcagctgtatctgatactctaccattgagtttttaatctcaataattatattttttactactgtaagttctgtttttaaaattttttagcaattctgcatgatcagtctccacagtcttatgccttcctcacacatttgatgcctttctttttttcttttaaaatttaaaaattttagtagagacttaaaaatttttaaattttaaaagaaaaaaagtagagatttaaaaatttagtacagattttaaaatttttaaattttaaaagaaaaaacagtattcttactttttatattctaaatgcagtaatttccatatctgagatcttaatgcatctgattcttttctttgtattctttgttgtttatcctctttcttggtctcaatatgttattttccattgtgttttgttatttttgttgttgttgtgagtttaggcttgatgaaactttttctgtgaggctattctgagtcttagattgagagtgtattcctccaaaaatatgtgtattttcttatggcattcatcaactagcactaccagtcagggggtgatatgaatttggagcacaatcccacattaggccccgtttatactgatacatttccagtgggtgtatttttttgtttttaaaaatgaggtaaaatttacataacataaaactagccattttaaactgtacattcagtagcatttattaccttcacaatgttgtggaaccatcacctctatctagtttaaaaatattttcatcaccccaaaaggaaatcccaaacccactgatatggtttggctgtgtccccacccaaatctcatcttgaattgtcattcccataatccccatgtgtcatggaagccacctggtggaaggtaaattaatcaggggagaagttaccctcatgctgttcttgtcatagtgagtgagttctgagaagatctgatggttttataaggggctttccccacttttgcttggtacttctccttgctgctaccatgtgaagaaggacatgtttgcttccccttctgccatgattgtaagtttcctgaggcctagccaactgtaaagaactgagccaattaaacatctttcctttataaataacccagtcttgggtatgtctttattagcagcttgagaatggactaatacacacactaaacagttacttcccattacccaactacctataccctggcaaacacagatgtgctctttctctctttatagacatacctgttctatatatgttatacaaatggaatcacataaaatgtgatgtctgatttctagcttctcttatttaatatacttcccaggttcatccatgttgtagcattatcagtattttattcccttgcatggctaaattccactgtacacacatattacattttgcttggccattccattgattgacatttgggttttttatatcttttcactactgtgaatagtgatgctgtgaacattcatgttcaagtctttgtttgaatatctgttttcagtacttttaggtatacacctaagaatggaactgtgatcatgtagtaaatctatgtttaactttttaaggaaccccaaaactgttttccactgtggattgtaccattttacatacccatcagcaatgtatgagggttccaatctctccacatccttgtcaacagaggttattttccattttattttgtttatgtatagccattctagcagatgtgaagtggtatctcattgtggttttgatttgcatttccctcataaataatgatgttgagaaactttccacgtgcttattggccatctggataacttctctggagaaatatccatttaagttgtttgcttgtttttttatttattttaagttctgggattcatgtgcaggacctgcaggtttgttacataggtaaatgtgtgccatggtggtttgctccacctatcaacccatcacccagatattaagcccagcatgtattagatatttttcctgatgctctccctcccccatccctcctcaacaggccccagtgtatgttgttctctatatgtccatgtgttctcattgttcagctcccacttataaatgagaacatgtggtgcttcggtgcttggttttctgttcctgcattagcttgctgaagataatggcttccagctccatctatgtccctgcaaaggacatggtctccctcctttttatggctgcatagtattccatggtgtatatgtacaacattttctttatccagtctatcattgacatacatttgggttgattccatgtctttgctattgtgaatagtgctgcaatgaacataagcatacatgcgtctttataatagaatgatttatattcctttgggtatatacccagtaatgggattgttgggtcaaataatatttctggttctagattcttgaggaatcaccacactgtcttccacaatggttgagctaatttacattcccatcaacagtgtgaaagtgtttctatttctccacagccttgccagtatctgttgtttcttcactttttaataatcaccattctgactggcatgaggtggtatctcattgtggttttgatttgcatttctctagtgatcagtgatgttcagctttttttttcatatgtttgtggaccacataaatatcttattttgagaagtgtttgttcatgtcctttgcccactttttgatggatttgtttgttttttcttgtaaatttgtttaagtttcttgtagattctggatactagacctacatcaaatgaatagattgcaaaagttttctcccattctgtaggttgtctgttcactctgatgacagttttgttgttggtgttgtgcaaagctcttcagtttaattagatcccatttgtcaatttttgcttttgtttgcaattgcttttgacattttcatcatgaaatctttgcccatgcctatgccctgattgatatagcctggattttcttctagggtttttatagtttggggttttacatttaagtctttaatgcattttgacttgatttttgtataagacgtaaggaagggatccagtttccattttctgcatatgactagcatcccagcttcatttattaagtaggcaatcctttccccattgcttgcttttgtcaggttcaccaaagctcagatggttgtagacacacagtattatttctgagttctttattctgttgcattgctctatgtttctgtttttgtgccagtaccatgctgttttggttaacgcggccttgtagtgtagttgaagtcagttagcatgatgcttccagcttttttctttttgattaggattgtcttggctatacaggctctttttggtgccatatgaattttaaagtagtttttttctaattctgtgaaaaatgttgatggtaatttaataggaatagcattgaatctataaattactttgggcagtatagtcattttcatgatattgattattcctatttacgaacatggaatgtttttccatttgtttgtgtcctctctgatgtccttgagcagtggtttgtagctctccttgaagcggtccttcacttctgctgttagctatattcctaggtattttgttttctttatagcaattgtaaatgggaattcatgcatgatttggctttctgctggtctattgttggtgtataggaatgtttataatttttacacattgattttgtatcttgagactttgctgaagtggcttatcaactttagaagcttttgggcagagacaatggggttttctagatataggatcatgtcatctgcaaacagagacagtttgacttctactctttctatttgaatactttttatttctttctcttgcctgattgccctggccagaacttccaatactatgttgaattggagtgttgagatagggcatccttgtcttgtgctgattttgcttccagctcttgcccactccgtataatattggctgtgggtttgtcataaatacctcttattattttgaggtatgttccatcaatacctagtttatggagagtttttaacatgaaggaatgctgaatttttttgaaggccttttctgtgtatattgagataatcatgaagtttttgtctttagctctgtttatgtcatgaatcgtttattgatttgtgtatatttaaccagccttgcatcccagggatgaagccaacttgattgtggtggctaagctttttgatgtgctgctgaatttggtttgccagtattttactgaggatttttgcagtgatgttcatcagtgatattggcctgaagttttctttttttgttatatctctgccaggttgtggtatcaggatgatgctggcctcataaaatgagttagggagaagtctctaaaactttggaatagttttagaagtctcaaaactttggaatagttttagaagaaatggtaccagctcctctttttacctctggtagaattcagctgtaaatccatctggtcttgggctttcttttggttggtatgctttattactgtctcagtttcagaatttgttatttgtctattcatgaatttaactctttccttgttcggtcttgtgagggtgcatgtgtccaggaacttactcatttcttctagattttctagtttgtttgcataaaggtgtttgtagtattctctgatgtttgcttgtatttctgtggggtccatggtgatatcccctttatctcttttatagtgtatatttgattcttctctcttttcttctttgctagtccatctagtgatctgtgtatttcattaattttttcagaaaaccagcttctggatttattgatttttttgaaaggttcttcttgtctctatctccttcagttctgctctgatcttggttatttcttgtcttatgctagctttgaggtttgtttgctcttggttctctagttattttagttgtgatgttaggatgtcaatttgagatctctctagattttttatgtggacatttagtgctataaatttccctcttcacactactttagcaatgttccagatattctggtatattgtctctgtgttcccattgctttcaaaaaacttcttgatttctgccttaatttcattatttacccaggagtaactcaggaccaggttgttcggttttcatgtagttgtgtgattttgagtgagtttcttaatcttgagttcaaatttgattgcacggtggtctgagagaccgcttgttttgattttagttcttttgcacttgctgaggagtgttttacttccaattatgtgactgattttagattaagtgccatgtggcaccagtaaaaatgtatattctgttttttggggggtggagagttatgtagatatctatcagactgacttgatccagagctgagttgaagtcctgaatatctttgttaattttctgtctcaatgatctgtcaaacattaacagtgaggtgttaaactctctcactattattgtgtgggagtgtaagtttctttgtaggtctccaagaacttgttttatgaatctgggtgctcctgtgctgggcacatatatatttaggatagttagctcttcttgttgaattgaaacctttatcatgtaatgcctttctttgtcttatttgatctttgttcatttaaagtctgttttgtcagaaactaggattgcaactcctgctttttctgctctccatttgcttggtagattttcctccatccctttattttgagcctatgtgtgtttttgcatgtgagatggctctcttgaatatagcacaccaatgggtcttgactccttatccagcttgccactctgtgtcttttaattggggcatttatcctatttacacttaaggttaatattgttatgtgtgaatttgatcctgtaatcatgatgctaggggttattttgcagacttgttgatgtagttgcttcatagtgtcattagtctgtgtacttcagtgtgtttttgtagtgtctggtaacagtttgttctttccatatttagtgtttccttcagaagctcctgcaaggcaggcctggtggtaatgaatttcctcagcatttgcttgtctgaaaaggattttatttctccttcacttacgaagcttaatttggccagatatgacattctgagttggaaattttttctttaagaatgttgaatattgaccccccaatcttttctggcttgcagggtttatgctgagaggtctgctatgattctgatgggcttccctttgtaggtgacctgatctttcactctggcttcccttaacattttttccttcatgtttaccttgaagaatgtgatgattatgtgtttgggggttgatcttctcatggagtatgttactggggttctctggatttcctgaatttgaatgttggcctgtatttctaggttgggaaagttctcctggatgatatcctgaagtatgttttccaacttggttcctccgttctccccgtctctttcaggtacccccatcagtcataggtttagtctttttacataatcctatagttctgggaggttttgtttgttcctttgcattcttttttctctaatcttgtctgcctgtcttcatttcagcaagattgtcttcaagctctgaaattctttcctctgcttggtctattcggctattgatacttacagttgcattgtgaagttctcgtgttgtgtttttcagctccatcaggtcatgtatgctcctctccatgatggttagtactgagtgtcaacttgattggattgaaggatgcaaagtattgatcctgggtgtgtctgtgagagtgttgccaaaggagattaacatttgagttagtgggctggagaaggcagacccacccttaatctggtgagcacaatctaatcagctgccggtgaatataaagcacgcagaaaaacgtgaaaaggcaaggcttgcctagctcccagcctacatctgtctcttgtgctggatgcttcctgccctcaaacatcagacttcaagttctttagttttgggacttggactggctcttcttgctcctcaagcttgcagatagcctattgtgggaccttgtgatcatgtaagttaatacttaataaactcccctatatatatcctataatatcatatatataatcctattacgtaatatatatatgtgtatatatatgtgtgtgtgtgtgtatatatatatatatcctattagttctgtccctctagggaaccctaatacactctctaaactggttattctgattagcaactcctgtaatttttatcacggttcttatcttctttacattgggttagaacatgctcctttagctcagcaaagttcattattacccaccttctgaagcctacttctgtcagttcatccatttcagcctcatcccagttctatgccctcgctggagaggtgctatgatcacttggaggagagaggcactctggcttttagagttttcaggattttttttgttgatttttttctcatcttcacgagtttagctttaatctttgaggctgctgacctttggatggattttttatgaggacattttgttgatactgttattattgctttctgtttgtttttcttttaacagccaggcactcttctgtcatgctgctgccatttgctgggggtccattccataccctattcgcttggctccctcccatcattcctggagatgtcaccagtggaggcagaatagcaaagatggctgcctgctccttcatctgggagctctgtcccagaggggcaccaagctgatgccagcgagaacactcctgtataaggtgtctggtgactccttttgggggatctcgcccagtcaggaggcatgggatcagggacccacttaacgaagcagtttggctgcctcttggtggaggaggtgcgctgcactggggggatctccctctcgtccagactgcctggattcctcagagtcagcaggggaaaagaataagttcactgatccgcagagactgtggccacccctcccgcaggggctctgtgccagggagatcagagttctgtccataaacccctggctggagtttttgaaattctcacagggaggccctgcctgatgacgagggatggttcaaggtccagcctaaagaggccgtgttgccacaatctgccacaacaactgtgctgcactgtggggaattcctcctgggtccaaaccccaccccagcaggggaaaatggcagactggagctgcagtgatggcagccaccccaccccctcatagctcagtcgtcttaggcaccaggcagcggcagtgatggtgaccacacccccgcccccaaccctggggagctcagtagtcttaggcagcaggcagccgaagtgatggcgaccgcctatgcccctgggagctcagtcatcttaggtagtctccagccaagcaaccattgagaatctgaacagctctgtttttgggacgcaaggtcctggtggcgtgggctcatgatgggatctcctgatccgtgggttgcacagatccatggaaaaagtgtggtttcccaggcagggtagcacaatcactcactgtctgccttagctgggggtgagagctctccttgctccatgtggccgggtgggccgtcgctccacactgcttttcctggctcttcatgggatacgccaactgcctagtcagtcccaatgagagaaacaggatacctcagttgcctcagttgtcagtgcaggattcacttgtttttgttcttcttggtggaagcccctaaccacagttgtttctagttggccattttagtccctcctcatttttaaaaaggagttgtttgtcttttgttgttgagttaaaagagttctttataaattctgcctataggctcttattagatacatgatttgcgaatatctgctcccattttgtaggttgtattgtcactctttgtagtgtgctctgatgcataaagggattttcagttttgatgaagtctaatttatttattttttttgcttttgttgtttgtgctttcaatgtcgtatctaacaatgcattgttaagcctaagattatgacgattaaccttctaaggttttaagagttttgtagtttttattctatttaggtcattaatcagctttgagttaatatttatatatatgaaatcaaggaacagctttattctttggtatgtagatatctggttgtcccaacacagtttattgaagaaactatatttccccattaaatggttttgacacccttattgaaaagtaattgtgcatagatgtatatgtttatttctggactcccaatttcattccattagtctatgtgtttacccttgttcccctgctgtaatgttttgattattcaagctttgtaataagttttaaaatcaagaaatgtaagttctctttgttcttctttttttattattttggttatccagggccctttacaatttcattagcatttttttcagcaaaaaaaaaaaatcattgggactttgataaggattgtactgaatctgtagattattttaagtagtattgccaacttaacaatattgtcttttaatccatcaacacacgatgactttccatttatttatgtcttctttaatttgttgccacaatatcttatagttttcagcatacaagtcttgtatcttctttgttaaatttatcacttagtgttttataatatttaacacttttctaaaaagaatttatttttaattttatttctgaattctttattgttagtatacagaaatacaactgatttttgtgtgttgattttttatcctgcaactttgctaagtgtattagtttacatttgcttttggtttttattttttctcttcatcaggacaaagaacaatccaattttctttgatgataacctttacaagagatacttatttggttgtattttgtttctcgctaaccatttaaatgagcaaacttttggaatcccagctttatttgaagttctaacccagttctctttctttgagggccttaggttttatctcttcctaacacatgtagttcattaatatcaaagctcctgttcagataattctggaaattacctgtagttcagctagcactctttgcactggactcatgttttggcttagcttgaactttcttgccaactcagcaatataagcatggctgtgttttgcacatacgtgtgtattttcttcaatatgttaaatgtttctcaatagattagttttagaggacgtgtgtcccacgttcagaaaggaaagtctcttatagagggtatttatgggaattaagagagaccatatatacaaaaagcctaagatgagcctcattacaccaataatcatctgatgtcattttacttttgtgtatattgttacaaatgtgcaaggatgcccaataatgtatcactgcttattgtaactgggaaatatgagtaacttgaaactgctagtgtaggaaacaatataagcatgcattcctgcttgagatgcatgatttcacttaaagcagcccctcaaacctcactgcaacactgctcaccttcataaaatggctcgctaacaggatgactagagcagtgataagaacattgtattatttttggtgcatcttttcaaaatgatcactccggtttaccattttcaatttacatattttactgttgtccattaattagtgttgaagcaaaatcaactagaagttacctaaagccaagttcaagtacattactgtcctggattcttacaggtaaaagcatggcagctcttaaacaagagcagaattaagttctaaggaaaccccccacagaatgtccattcaatgggaaagcttagcctgaaccaacacaatggaagtccaagacagatgtaatttcatcatgaaaatgattaaagcaggacttaaagtgaattgaacctgtattctgaaaagtaaagactctgttgaatcagactgcagataccattacttattgatccagcccatgaattgattatcttctttctctttaaccctgacttctatctactgaaagcctgagaaagatttttctatagttaaaatgcttttcattcagcataactagctatttcactgtttatctacgtactttatatagtaatttttaaatgtgtcaagatatatttagcaaacatatcaattagattacaatgctgagtaaagcaattttatttgatgtttgataaaatgctcagataagcaatcacactcttttaaaaagcaaattttaggcataaacttgttctgtcctcttactagtttttttttttttttttttttcacactagctagcaacacatgccattgtgtgcttttggatttgacacatttggggctttcttttgctttcaaaataagtcttgttattactacagtttgggtcaggcttattgtacatgaatgcaatagttatatcattatattataagcagctaattgtactggttgtactaatgaattattcatggcataatcacataaattcacttcatgctgatgctttattttgcatactaatttgaacatagtgcatttttcacattttgatctagagatgatctcagataatgacctgtttgtggatatgggggtttacattgaccttaatatttttcttttctctaaacattgctccataatgtgtacatttcatcagggtggtataggtcattcagaatcagggccctgctaataatttcttttaaggccctctaattattgctcattaacagaatttccaagataatctttccaacacagagcattgtgttaccagggtcttccaaatagtagatgttgtgcctattttcttctccttctaactcatacttcccaaactaatcctctcccttttcttgcccaatctctggaattttcattgaattactcttttctaacttacaccttatccgttcatgccaacaaatcccctatagataagcctaaagttttatatgtggagaaatgacaccattggccagtggctgggtaacctaatggtctccctgactcaactttctcacttcaagccctcatatagttttcagattagttcttctatagccactaattaaggcatgtgcttccactgcaacagaatcttctatggtttattactctttacccacattaaaacatctctgtttagctttcaaatcctccctaaagcatccacccttctagtgatcttatttcatttctccctccagtgacaccagtttacttattgctctataaacacagaaagtttataccactacctacacctttgtttatctcctatctgcaaattcctgtttactttcacctatgacattttctcaagactcagtacaagtgccatttagtttgtaaagccttcttggactatcacaatcattagtgatattccctaattccctttaccacttgccaatgcttcagtcacttcattatacacttctttatattttgtgtttagtcttgtctcatgtgttttaattttaccttcccaataggattataatttttttgaaagtctgaaccatactgtatataatctatttatccctttgtagggttgataagcttcttattgtctagcaaaatctaacatgtcttaagtgctaataatcatttattttatttgactcattattaatgcctgacatggcaggtgttgacatgtacgtaatagcattaaagagggtccaaaggaccaagctatatttcatgttgtgggtggtactttaagcaaatatatttatcataaaatggaatagcaatttttctttctgaaagtctgaagctgaaaaattatttgacctatctctcctgaattggaaatatctaacatcaacctttaggatgagaggatcatttggctgcgctatctggtatccatttgatttctgggtggaattagttcatctggcttgctggccaggtgtcctattcattcctggatgctgaaatcatgaaaaaaaattgagaagatgagcatcccatttggagaagaaggaacattctacagtcaagaatataaaaggagctccaccttctctctaccatattttaggaaacaatagcaaaaatcagtatttctacacactaaaagtagtgtctatgcctaactattatacagatttgcaaggtttttatttttaaatccttggatttcattgccttaaattaacgaaaagatgattttaaaatagtgaagtttccttggagatatgcaagagctagactgcaaattccatccagggaaatgagagatcatgtctaccttatttctaatgtgtccccagaggacagcacagtgtctagcatctagcagatgttcagtaaatgttcctggatatgtcaatgaataaacatatgagatgataagtgttcataataagtccaagcattgtggactccacctaccagttaagtacaaagatagtctcatggatgttaatatcctacatttattgttcctaaactatccttctgtttaactgtaggaagtcaagtgttttgtagcttccctacccaagtattctaacatctccaggggcacttgttagtttttattgcttgctgctagggctagcaacccagaactctccaatctttggcccttggattcatggaaaaactgttccaaggttaaaatattgttttcctagccactgccgttatggccacaaggggaatctcgcatgcaacatgccagtgaaactgggcctgtgcctctgtcatgaaggtggagggtaattgggtggtagaaaggatacccattctacattaggcttagctagtgcttctaatggcaatttcggttgagtctcaaggattaggcatccagtacttcacacactcactcacccccatagagaatgagccaggatcctaaagttccaggcctaaaggtcaaggcctcttccaggctgagactctcctctcattgctatccttcccgcctgcaccacatggggtctcttgcatttttccatgtcgctgaaatcagaactagcactgcctaaaatgcaagatatttcttctcctggaaaatctgccatgcttagaatgtaattcacggataaaaccctcactgccacctatgcaaagtgagagaaacagtgttccttctccagtatactcagccagggctcctagaacaaagcttcttcagttccaaatgttatcatgttttctttgatggatcattcaactaacaggttgtttggtcctgttgaaataaggttgtttggtccacttcctgtaatcagctggcaaactatacccacatccattaaccccctccccactcaggacctactgctgactccagaccactggattatgccaccccttttctttgatgagttccttctcattgttccctttcctttgtcctctgagatcactctctgccacctccaaaacatcagatatggctgaacctttctggtgagtgggttgaagtctttcctttcttctcttagatcctacacaaaggagtggttacaaaggtgagttatggatgcaaaaatcttaataaaataccggcaaaccaaatccagcagtacatcaaaaagcttatccaccacgatcaaatcggcttcatccctgggatgcaaagctggttcaacatatgcaaatgaatgaacataacccatcacataaacagaatcaatgacaaaagccacatgattatctcaatagatgcagaaaagtccttcaataaaatgcaacatcccttcatgttaaaaactctcaataaactaggtattgatggaacaaatatcaaaataataacagccatttatgacaaacccacagccagtatcatattgaatgggcaaaagctggaagtattccctttgaaaactggcacaagacacagatgccctctcttatcgctcctattcaacatagtattgcaagttctgaccagggcaatcaggcaagagaaagaaggtattcaaataggaacagaagaagtcaaatcatctctgtttgcagacatcatgattctatacttagaaaaccccattgtctcagcccaaaaactccttaagtggataagcaacttcagcaaagtctcaggatacaaaatcaacgtgcaaaaatcacaaggattcctatacacaaacaatagacaagcagagagtcaaatcatgaatgaattcccattcaaaattgctacaaagagaataaaatacctaggaatacagctaacaaaagacatgaaggacctcttcaaggagaactacgaactacttcttaaggaaataagagaggacacaaacaaatggaaaaacattccatcctcatggatagaaagaatcaatatcgtgaaaatgtccatactgcccaaagtatttgaaagattcaatactactcccatcaaactaccattggcagtcttctcagaattagaaaaaaactactttaaatttcatatggaaccgaaaaagagccctaatagccaagacaatcatacacaaaaagaacaaagtcagaggcatcatgctacctgacttcaaactatatactacaaggctacagtaaccgaaacagcatggtgctggtaccaaaacagacatatagaccaatggaacagaacagggacctcagaaataataccacacatctacaaccatctgatctttgacaaaccagacaaaaaaaatgcaatggggaaaacattccctatttaataaatggtgctgggaaaactggctagccatatgcagaaaagtgaaactggaccctttccttatatcttatacaaaaattaactcaagatggattaaagacttaaatgtaaaacccaaaaccacaaaaacctttgaagaaaacctaggcaataccattcaggacatagacctggacaaagatttcatgatgaaaatgccaaaagcaattgtaacaaaagccaaaattgacaaatgggatctgattaaactaaagagcttttacacagcaaaagaaactatcatcagagtgaacaggcaacctacagaatgggagaaaatttttgccaactacccatctgacaaacatctgatatccggaatctacaaggaacttaaacaaacttacaagaaaaaaaaccaaacaatcccatcaaaaaatgggcagaggatatgaacaaacacttcccaaaagaagacatttatgcagccaataaacatattttaaaaagcttaacatcattgatcattagacaaatgcaaatcaaaaccacaatgagatatcatctcttgccagtcagaatggtgattattaaaaagtccagaaactatagatgctggcgaggctgtggagaaatgagaacacttttacattgttggtgggaatgtaaattagttcaaccattgtggaagacagtacggcaattcctcaaggatctagaaccagaaataccatttgacccagcaatcccattcctgggtagatacccaaaggagtataaatcgttctactataaagcacatgtacacgtatgtttattgcagcactattttcaatagcaaagacatggaaccaatccaaatgcccatcagtgatagattggataaagaaaatgtggtacaaatacactgtggaatactatgcagccataaaagggaatgagatcatgtccttcacagggacatggatgaagctggaagccatcattctcagcaggctaacacagaaagagaaaaccaagtgggtgctgaacaatgagaacacatggacgcagggaggggaacaacacactgggggcctgttgtggggtggggggcgaggagagggagagcattaggacaaatagctaatgaatgtgggacttaaaacctagatgatgggttgataggtacagcaaaccaccatggcacatgtatacttatgtgacaaacctgcacattctgcacatttatcccataacttaaggtaaaataaataaaaaagtgagtgaaaagatactgtgatttgaatatttgtatctcctccaaagttcatgttggaacttcaaccccagtgtgatagtactgtattaaaacatgggatctttaagaagttatatggtttggctgtgtcctcacccaaatctcatcttcaattgtagctcccatttttcccacatgttgtaggagggacctggtgggagacaactgaatcatgggaacagcttcccccatactgtttgcatggtagtgaataagtctcatgagatctgatggttttataaggggaaaccccttttggttggttctcattctctctcttgcctgctgccatgtaagatgtgtctttcaccttccaccatgactgtgaggcctccccagccacagggaactgtgagtccatcaaacctctttttctttataatttacccagttttgggtatgtctttttcagcagcgtcaaaacggactaatacaggaggtgattaagtcctgagggtggaaccctcatgaatgagattagtgatcagataaaagtgctggaagggactagctagaccaattttgcccttccatctcttccactaggtgaggacacatatttgtccccttttgctcttccgccttccaccatgtgaggctgccactgtgagaggatgccatcagtggaataaaccctcagcagatgccaactctgctggcaccttgatcttaggctttccagcctatagaactgtaagaaaataaatttctgttgtttataaattacctagtatctagtattttgttatagcagtacaaacggactaagactgtcacctactataaaatgccagagttctgctattttaaaagtaaatatgaagcaaaatgcacgagacactttgtaaagtttaggtccatgatttgagaacactcaaatagcatagacatgctggtgagaacttcagtgatagatactactgttcactgtacagtacatctcagatggtctctgaattgcagggaagaagtggttgctgggaagcttagtgtcttcatccattttgtgttgctataacagagtacctgagtctggataatttataacgaaaacaggtttagttagttcacagttttgcaggctgagaagttcaaaagcatggccctggcttctagtgagggttttggtgctaaatcataacatggtgtaggtcaaagtggaagcaaacacgtgcaaagaaggaaaacccaagggacatctttgctttttcagcaacccactctcacaggaactaattcattcccacaggaactaatccagtctggccaaagcaagaactcattcactaacgtgagaacagcaccaaaccattcatgagaaatttgcccccgtgaccaaaacaccacccataaggtttcacctcccaacactgccacattagggatgaaatttcaacatgagttttggcgaagacaaactcaaacaacagcaaaaagtcctgttgtagatctacctattttgtctttctttatttcaaattgaaagctatataattatatttatatatattttaaaatattattttaaataataataaaaataaaatatattttaaaatattagttttaaaatagtaatttgatgttactccaatataacgccagaattttccaaataaagcaatgggttacctttgtaacatttttgaactgcattttttttgtttaaaataattgtttctactatgtttcaatccatgcgaatacatatcttttatttaacacttataggacattttgtttaatttagtcattttatctttcattgatgatgaacttacatgaaacctgtgtagtattggccaaactttatttttaggtgatatcaggttatagcactttttctttaccaagaatggaggaaaataagtagtacctgtttttcagaggaaagataaatgtatgcaaaatatcagtgtcatggatgcaagatctctgtttattagctatcaggtaacttaagaggttagagactgaagagaaagccatcctctacatatggctttgggaatttggcaagaggtgaaaggaacattataagattaaggcctgcagagtaacttaacatgccttatgatatgtagaagaaaatgcagaaagataggaacatgtgagtgatgtagtccaggatttaccacaagaagcaggaatcaactgctcacatgtatgtctctttaattgccagatatcttagtgtctaatagcaattacatcccaaaagaactacaatgacatttattgggtaaccactatgccaggccagatatttttgcatatgttacctcatttaagcctcacaaatcctcaggtatcactatccttttgttcagatactggaactggagatcagagcatttaagggatttctgtacagtctgaaaagtaaggatcagaggtcaaattctaatccaggacaaaccgttaactatgccttctttgactttaagataagagaataactcagaattttatacatttaataggcagaaaaactctaaattctccaattctatacaggtatttcctaaaaagcagcataatcattgtcatcatggggaagaaatgtagatcaatcatctcaatgcacttggcttagtgctagcagtagctttaaaggaattaatagataaattcccttgactacgattttagaatcattaaaaaagcattgagaaaagttattttctaggtaactttccccatgattttgaaacttaacctttattggaaccttccaaatctttctgttcaaatccttatgatttagattatgaacttaagttggaaataacttttccttataaaatcataatggttctatctatctatacacacatacgtatttgacctcaatttaattgtctttgaatgagattctgcattcatgttaagatatttcatttatttaaactagattattccattaccaaacatgccttctgtttaaactgtttgaatcacagccaagtaagaagcaaatcctattcaactgaactgagcctctctggccagccttgtgagtaaggagaaaagaagtaaaagagggaggagaagagtttgattatggtgatttggtacctggaaaagatggggtaaaatcatcaggttttgtaaataaaaatacagaacacttgaatacatttgaacttcagataaaacaaggcacagttttttgtacaaggatgtctcaaatactgcatgagacatacttatattttaaaatcacccattgtttatttaaattcatatttaactgggtgtcctatattttatctggtaaccctagatgaaggatcacacaggacaaatataactagcattgggttccaattgccacatgtcttttatgcacagattggcaggcttctcctgggggaaagtagaggcttaaaattgaggctgcttttgctcactgcttaatagtgacaagctattgatagccaggcattgccaaattctcattagtttctaaaagtcaggaactacatttagaaaaaagcggctcgcttatggagaggtcatctctccagtaacctcaagtaccaggaacacagctgaaacccaggaagcaagggaaaaaaaggcctctgaggattcaaaatagaaaccatgtgctaaagctcatgctcttttctctgagaagaggccctcagacttgcactcagtgtaatttgctcttctttcagacaccatccaaacaagtttggttgtctgatttcccacccaacagagatagaaagcaggaaattgcaaagtgggcaggatggctatgtagactaggggtcagccttgtggcagacgatctggtaaaaacacatgcacacatatacacacacaaacacacacatgcactccactatatgcagcaattcccataaaaatttggaagaaatgtaccaaaatggaatttgtggttattttttagtaatgagcttacaagtggtcttattttcttcttacactttttaaatattagctaaactttttacatgcatgtttatgatcagaagaggcaacacagatattttcaattaaagaaaatttaaaaattatttcttgattctctcaggagagctctgttcacacctctattagaagcatttcccaaatggtaattatatgccagacatttatttgtctttgtcctctgctgacttgtaaactttttgagagcagagttagtacctttgtagcattgtagccttagttatcagcataatctctagcacaccaatgcccaataaatatttgttgagtatggaatgaaagtcaaaatgcatggtgtttctatgggcatctagacatggaattctccacacctctgtctcccaggagcagtgcgccactgtggtctgctttgccctttgactaggataaaagtctactctaagtccacaatacaaattagaattaagattgcattctctgtttttaaaagcacagaggaatatgatttattctggcaaagtgtcttttgaaatggttagcatcttttaaagttttggcttaaaggaatgagtataagaaattttgagaattctcttacttttagtcatttatttgaaaatctggctgtatctgttaattgaggatcatgggctaaagatatgggacacggctctcagagttgcactacagaggtaaaatgcaatctgtaaaatattggctgtagaataagaccatgtacaagttctagaggaagaaatgagagacccctatatgtattactttatatggcatctttataaagctttaaggcatgtgcatctttgcaaataaataaaaatgtgaaaaacaccaaagctctactttccttgtaaccaatttccttaaagacccccccttctcagtgctacatagaaggattgaatatggtcttaagttctactctttttcaacacaaacgaagattaaaccaattcattcagaagaaagagaaatgactggattccatttacaagtagaaaaggagtagaattttaggtcaggtgcagtggctcatgcctgtaatcccagcactttaagaggccgaggcaggtggatcgcgaggtcaggagttcgagaccagcctggccaatatggtgaaaccccatctctactaaaaatataaaacttagctgggcgtggtggtgtgcacctgtaatcccagctactcgggaggctgaggcaggagaattgcttgaacccaggaggcagaggttgcaatgagctgagatcatgccactgcactttagcctgagcaatagagcaagactctgtaaaaaagtaaataaataaaaaataaaaaacataaaaaaaataaaaaaaactatgactatttaatcagaaagaaatatatgagttgctgaacagtggatatcatggcagagatacgtgacaatactgaataggatgattcaccatctgttatttatgttttataaatgatttcaaagcacattttagtaacttggacgggattctcaaagcgggaaaacagtgttgcctttgcccacaaatgcaccagggcctgccagcagagccccttaaccctaaaaagcagctactcaaaattaaaatgcacatgaggacatttttcactacaatcaacctgggtatcagtatcgacgaacagggctaagcattggtaacttaatgcagagataaatttgtactttacccattgaatttggttccttttccacatctgtaaaaagttaaatagaatggtaaagttacctgatttgtctttcatctcgttatttctctactccttgaaggtaatgccgaggaaacacacacacacacacacacacacacacacacacacacagagagagagagagagagagaaaaaaaagtaagtccaaagcaggcagcaggaaaaagacagaaaaagtgacaaataaatgattaatccctggaaaatttaaatttaatagtgaatacggacaactttcaacttataaaagaaaaacatcccttgggcatcaagcctaagatactcaactgtaagaggcggtaagtctgtaagcctaataaataactttaggaaaagttttaaaactttgttttgattttttaaatatctagaccaatgtgtttttaaaaactagaaataatggaataaattcctaatatttgaaagaagatgtcaagaaagatagcgaagccttcctaaatcacaagcctctatgtcactccttagacataatcatctttttgtatcccacatgaaaatcttcagctatgaagtgactatacggtgctgttcctgcccaagtcaccactaaactgagaaggctgatatgccactggtcaggagacagttaatgatgttacacaggaaacatggcacccaagtttctaaccaacagtgaatctgcttgttaattacattctgagcagggagtgacttttgctaccaaaggggatttaaagaaccctttccacactactccagagatgtgaatgctgagcctacagccatgcaatgaagtatatgtagcaatgagtatcacacagcctcacacagtactctaagaaatggttaagaaaaacaaatcctccataaaaatcaagtaaaactataaataattaaaaactgcctttggaataaatgcatatgaatactaagtctaattagcaataaggtctttaaacacacacacacacacacacacacacacacacacacacattccaaggcagactttgtaaggcaaagaataattttaaaaaatgctgttgctgttccctacaaaaatgctgattaaagattgctacccgcttcttaccccagagaaagtggaaagtcaaaccctgatgcccatatttgcctgtatcatgtccaagaaattatggtaaattgtgaatcagtcactactaacaaatccatttgtcctcttcataaagactggagctgaagaatctgctgtcaggattcgatggacagatatctagaacaacagacccagtgaatatttgctgaatgaatgaaccttggatttggaaagccttctataccagattcatgtttctgatgttctgaatggagaaaaacaagtaaagagttatcctcaaagttttctctcgtgatagggcttatttctctttaggtgtgctacatactatactatgttcttcacattcaagatgaaacgggataaacgtcctaacaaactttacctctctggacttgaccttttagatatattttggttctggtcttggcttttgggtaagtagctatacagagttcatccctcacagccagttcaagctggctgaacattatgtccagtagagggttccctgggagactgatttggcttagaaccttttgacccattctgttggcaaacttaaaggttcacacaggtccgtcctgatcctttcaactatttcaaacctcctatgcccttgaagtgttctctcactttttttttcttttttttccctgagttcttttgagcagggataattagcaggcgtattagtttccaagggctgtcataacgaattacaaactggtggctcaagattacagaaaatcattcttttatagttgtggaggcgagagtctgaaatcagggtgtcaacaggaccatgcacttttcaaagactctgggggagaatccttccttgtctatttcagattcttggcttgtagttacataactccaatttctgcctctgtctttgtatgatctctcccctgtgttttctccctttctatgtatcaggacatttttcattgaatttagggccaattaggataattccagatgatctcatcttgagatccttgacttaattatctctgcaaagatcccttttccaaataaggtcacattcccaggtaccaggtggacataccttatgtggaaaccaccattccattcactacagtgagtgattcatctttagatttgaagaggtaaataatttgtggtattacatttggtgctctaaacatttattttaaatattctgcataccttaactttgtgtctatttattttaagttattgctttaacttattattattgtcttcattggtagttcttctagaccaaagtttttcagtcacagcatgactgacatttggggcttgataattctttcttgtgggaggatttgctgctcattgtattgtgtttcacagcatccctcgcctctactctctaggtgccagtagcattccaccagttgtgtcaataaaacatgcctctagaaattcccaaatgtccctggatcaggaaattgttcttggttggaaaccactggtccacttcaaacatttctagataagactattagaaattacactgaaacactaaaattcatctaaatcataactttgatttctttggctaaaacttgtgcactgaaaatattataaaaatgttttattttattttggttcagaataatgagttaatggaacattttcccagggtatacataattttcaatggcccagtctctactcacgtagcaagtgatatgaaggaccaggcttagtgcatgctctcccatttacttatctgctattcaaaaacgggcagaaatctgctcctttcgaccagaaaggcaaactgaattccttcataacagggtttgacagagaaatatatgtgatatccattaatgaagtaaaattgcagaaaaaccacttctttatacaaagagaaaaaatatcaaccattcacctttattgccattaggatcaacatggaacactcaaacaatggttctgttattaattcagaaacatccaacccacttatgagttaaagcaagatattaggcacagatctatgagctattaatattgtctgttttaataaaacatatcagagcttacactaacaaaagttgttgcttcaaggttgtagacaccttagtaagctagacaatttagtaaactccaaaactgtcattgccccattctccaaccattttaaatgttgtagacctgaaataaaggccatcctgagtctcaacaagaactcatttttgtttagaattacatctaattttggttaactggatttttatctacaaaacttgtttccaacattcaaatccacatttaaaagtttaatatggccgggcacagtggctcaagcctgtaatcccaacactttgggaggctgaagtgggtggatcacttgaggtcaggagttcaagaccagcctagccaacaaggtgaaaccctctctctattaaaaatacaaaaattagctgggcgtggtggtgagcacctgtaatcccagctacttgggaggctgaggcatgagaattgcttgaacccaggcggcagaggttgcagtgagtggagatcatgccactgaactctagcctgggcaacagagtgagattccatttcaaaaataaataaattaatttaaaaaataagatgataataaaataaaataaaagtttaatgttactaccaacagaaatatttttaagattcccagttttccaagacaatttaaaaagacaaagcaaaaatattttgagtaatgatagcttctttgacataaatataaggtctcccaaggtaaccgctctgagaaggacaataagcatttggatttataaatgttgctacttttaagaaaataaattgcattattttacagatccaatctatagataacccattagctaaacattctttgaaaacagaaatcagatttttttccagttatagctaacaatactaatttcaaataacaattataataatttattatgagagaagatctttttgagctattaattaactgaattgagaggtagcatagcatactgaataaaaccatgggcttagtagctcaactgctaggatgcaattgtgactctgtcagttatcaactgtgtgaccttggttttctactctgtaaaattggtctaataatagtaacaacctcattaagttgctgtaaagattacaagttaatgcacataaagcatgaagagtagagtctagtatgtagtagatgttcaataaatgattatttctgtgattgtttcacttttctcatgtctctttttatttgatttgatccaattccctaaagacttcacgttaagaaataaaacatttgactccaaagacttttggcaagctgcacttttcagtctcctagtttgtctttatggcctttggggtccatatctttctgctgcattttacaagttctgtttcaatcatatttacttccattatatattaagtcatattgagactacataataatacatgacaatagataaaaatttggttagcccagagtaaagaatttaaagttatcattggacagataatagaaagaggaggaggattattttgtgtgacataaatcaagcatggtgaaaaacaacgtaatgctccctcatagaagcaggttttcactaaggggctgatgatattcaaattgcataaaatgaatactttccctgggatagtcttgaccacacagtatttatttttttaattcacaatattttttgaatcaatttttaagttggtgcttaagtgattaatttcttaatcatgacatacttatctactccaatgtaggaaaaatctttttatctctcaatactcataaataatagatgaaatgtaattgaactattataaatattattgatgacagaaggaaacaaacttctgagttcagctcttcctaacccaagagagattgagcaaaaatacgtatattatgtgggaaattacaattcaagtattagaactcctttgtttagttagttatttgcctcaggcaggtgataattttcaaacctagaaacaatttattttaaatattcaaaaattaatatagaaaataaggctaccaaacttttccaaacacatttacaaagaattcttgaggaggaaaaacaaacttgaatgatctgcttcctcattaccataaaaagttgttttgtgatgaacccccttgattctaaggacaacaatccatgacaattattatcacagacaaaatttccagaatataagaaattcttcctgtttccttaagtggttttaaaaagattcatcatgatcaaatataattttagtaaactcttcatttcagaataacataagatgtcccagtgagagaatacgctgaaatcctttaatcatacttttttgcaaaagagcatttacaaagcatctttaagtcaccctgaattggcataacgtattgaagatttggggcatgtggctggatgttaccttaacatggtgacaaagatacaggaagatagagaagaaagaaaatggagaatggaaaaattccaccacttgtacataaaaagcatgaggttacatatgttgtctctctgcgtggttcttctttccaaggctctgggaagggaaaggggtaaaatgatcttcaattctttctcaggcctgtactgtaccactgcctttcaatattctcccatttggctgagtttgtcgaatttaaaacatgatgcagtgtttactttatacacattaaaagggagttatgtttaaaacatataaactaaaatatctggactatctgtaactgaataataaaagaagacacaaaaccaaatatgaaaaaattaacaaagaacttgaataaacaactcaccaaggaagaaatccaagaggtaagtaagcacatgaaaagatactcaataccacgagtcattaggggaatcccaattaaaatcaaagtaagatattaccacacttatactagagagtggataaaactttaaaagctgaaaatacaaagtactggtaaaggtgtggaacatctagaactcatacatttttctagtagtaatgcaaatgttaccatcactttgaaacataattttgaaaaataagtatacacttaccatatgatcaatcaatagctcatctaagtatttacccaagagtaatgaaaacccatgtcctcacaaaaacctctatgtgaatgttcacagcatttttactcataattgcctcaaactgaaaacaatacaaatgttcatcattagtgatggagtgaatggataaacaaattgtgataattccataaaacaaagtgctactcaaaagcaaaactagatgaacaattgatgcaacaacatggatgaatctcaaaaacatcatgctaactgaagaaagccagacacaaaagcttatatgccatgtgattccagttacatgattatctgagaaaagcaaatttaaagggacatagatccaagacgtgattgtcagggagttggggatgggggaagaggctgtgttacaaagaaggatagaggacatttttggagcgatgaaaatattctatgtatatcttgatgatagtagtagttatacaaatatctacattcatcaagatttataaagctacatgtttaaaaaatggtgaattttactgtatgtggattatacctcaataaaattgactaaaaaatcaatgcaatatatttaagatcaccctgacacatgggatagttcactccaaacctaaactcattgacacagaaccaagccatgaccagataacagatgtaggttatcatcatttattctggcttcccataaagtccttagtgtaaccatctaaaacctggtagtgctattgcccttgatttaaaaaattgacaatttccctaaggtcactgcattaatcagggtagaccaggtatactatagtagtgtattagttcattttcatgctactgttaaggacatacctgaaactgcgtagtttataaaggaaaggtttaattgactcacagttctgcagggctggggaggcctcaggaaacttacagtcacggcagaaggggaagcaaacacgtccttcttcacaaggcagcaggagagagaagaatgagaggttagggaagggggaaaccccttataaaaccatcagatcttgtgagaactcactcactatcatgagaacagcatgggaaaaaccaccctcatgattcaatgatctcaacctggtcctacccttgacacatgggagaattactataattcaaggtgagatttgggtggggacacgaagccaaactatatcaagtagcaaaccccaaacctcagtggtttaacatagtccatatttatttcttgcttatgtaaattctgctgtgagtttctggtgactcttcagggtatctgttgtccatgcattcactcagtggtcccagatgagctagtttccaccatgctatagctgtgtcaactgtagcatgcactttctcagtcaatgcagcaggaaaagagaatgctcacagtagcattctcacagtagtgaaagtgacaacacaacacatatcattgcttctcacaaaattttaccaggaacaggttgcttagtccagcttaatttaaaagtcagaaaagtataatttcccctttgtgccagggagatgaggataaccagcttgggataagcaccagaagttactaacacagttctttttattttatttcacaatatactttttgctgtttcttatcaaataagtattcatgcacacttattattctgggccatgaagtagcaatgtattactaggcagaagcagtatggtaccatgttcttgttgggaatatcatcatttaaccctcaacattgttgcagtggggtaaattaagctgccaagggcttaatgtttttctcctaggatttcctgttgagttttggtatctagagactgatggggattagctttgcatgctcccgcttagtcttcttgcatgtgggaatttgggagcaattaatgtcatctctgatgacagaggaaattaactctgtgtgttagctatgttgatagaacatactcaaaggttcagatggcagtctgaacttctgaacttttgggagctaaatacacacttaattctttagagatccctgaagacacaaattaaagagggtgaattaaaagaaaaaagtgtttccagtttttataggaggagctttgaagtcaccatggaatgagtctgagaatctctacagtatctgtatactgtaggaagaggagttaaagtcagatcattggtgaagtggaaggttctcacgtgagaggcaggtactgagatggcggaaagagcaaagctgctggaaattggggcagtggatcaatagtgggggatggatgtgggacaagcagacgtgatctcaatcatgaaatgtgattttggagcatgatagttttacgggtccttaaatctgtcccaatttatccttttctcatggaaataacgagcgcactatttgtcttttgaatccattatacagagtgagtgcaacatttcaggtcaaaagaagatctgttcccatagactgaactaccatgttctttttcctaatgataattctagtgaaaataaaacaacagcaaaatgtgtgtgtattaatgaatgtgtgtgatctgagcacatacaacacaagtacaactagatataaaataggtaagcagacaaaaccttcagtgagggtttccattatgatgcaacataggaagtagctatagtgtaatctgtagaagcaacaaaatgtagcatttatttcatcccttctatgctgcatgccaatggcagacaatgttaaaggagcacagctctctgttctatgaagcccaggccaggcctcagcatccttgtcaacccagcactggaagtagccactatataaacaaataaacaatcaaattttgcactcgatttgagagctactttctatcaaacaccagcaaaagatttctgaattttgaatggtggtgaaaactctccagagattttttccttttcactaaaagcctggtgagattatgcgtttcctttttgctttcttttcttactctcctctgtcttttcttgaaaaaaaaaatgtactaagcactaaccacaagaacctgcatgtgtcaggtgctggagataaaattgtgaacaaggcacagtgggaaaattctaagtaatgtccagcactcataaccagtcacttctggaaagattttcttcactttgctgaaagctatatgaatccagtttcatcctaccatgtggcaatttctacccttctctacccccaccaccccagtttaaactatatcatctattgcctggactgctgtaggagccaccttggtaaatctctacattcactcggatcctatccaatccatcttctgcacaggagtcagagcaattacatacagggtcttgtgattctcgtgcttaaaacgctccactggatttccccggctctttagatggaagccaacactcctaacacggcggccaaggccctgtgtaatttgttccatacctgtttattcagcttcatctaccacccctctcttcttcactgtctgttatccaaccacaatgtttttccatttctcaaacttaccctttctgccttgcagctttgtagcctgcaatactattttcccactttgccttctagttaactctgtcatcttttaagtttcagttcagaattcacttcacctactgcacacccagctacttttgtattaatttcatggtatcatgtacctctccttctttcatcacatttaatgataattcatgttgtctgtttgattatttgattaacctctgcctgcctcattagcctattagctcaatgatgacataatgattgcaaggaaaatgtctgctgtgctcttaagtgtgtttgagcgtgtgtgcacgcacgtctagcacatagtagatgctcaacaaatactagtggcatggaggcaggaggaaacaactcactggttgcatgaatgaacaaataaagataggagtgttcctgtccccagaccttacaatctaatgggaaacagataataaatagacaatttgaagacagtttgatgagttctgtgagaagacaagtatagtgtgctacatgcaaacataagagggatactgaattccaatttgaaggggctactatagtagagatgaagaggaattatataatcaagagttacaatagacatatttacagaaatggagcagtttcacatatccagcccttgcggggctatgtatagtagtaaataagaacagaaatacaagctgtggaaattctgctgcaaaggctgtattttaaagtctgaactctaaatggttgcaaacagagagagactgagaattcttccaattagcacatctgtcttgactcaggaagtgactacactgaggcagatccacataaaaacagagaacacagagggaagtcaacctatgattaaaaaaaaaaattcaaataatgacacagtaagaggatcagggtcaaaactgaagatactttccccctaagctgtgcatagctagaaaagattagtaggggctgggggcagtggctcacacctgtaatctcagcactttgggaggccgaggtgggcagatcccaaggtcaagatatcgagaccatcctggccaacgtggtgaaaccctgtctctactaaaaatacaaaaattagctaggcgtggtggcaggtgcctgtagtcccagctattctggaggccgaggcagcagaatcgcttgaaaccaggtggtggaggttgcagtgagccaagatcgtgccactgcactccagccaggcaacagagtgagactccgtctcaaaacaaaaaaagaatgtagaaaagattagtaggggacccagggatctcattttagttaaagctgagcacggtttctgggcatttcatacatgtatgcatagatatgctttatatgcataattgaataaattaaatatagtttattgtaaattacagatgggtcattctgaagtaatcttctttattgccgttgcgaagtctcaattaaaaaaaaattagttactgttaaacatatatttggacacaaacaaatccaaacagcacatgcagttgaactcctggatagccaagccaagcagctcacgttagaggactgtgcttgaagaagatctgttcctgatggtgagcggaccacatgtcattcacaagtacgtatacccttcaaatagctttgctatagatttgccatgtagctttcaaggccagagaaagggggtcccctgagggtctttcttttttttttttttttaataatggagcccatgaacactagtgcagaatgtaaatgtgaagtcacagaacccatttttcctaactgtgatcacccagattttgctgtagggtagcaaatgactgcagattccagggggagaagccaaacagctctcactaccctgaaaaaatggaagtcagaaaaagcattcaacaatgtcaccctgctgcaagcatgttaggagctgtccccagagacctcatcttcctcttcatcctcagcaaagaaaattaaatgtcactagtgagcacagaacctccctcatttcaccattatcttctcttttctaaagatgctttatgtcctttctgaaagtactaaagaaatccttaatgatatctagaaataatgtttctttcttgcacccagaattttcctgctctttggaaagtaacacttcactctttttttttttctgaattattatttacagggcaagttgacattttaggacacaaatcagattatcaagtttagtcttggtgaaatcaccttattatttgtaagaaatacctgtcttcagttaaagcatgggtaatcattaatgataaatataatgttatttaatatgtggtatgtaattggagagtgccataggtgagtgcagacagaaataaactagttttcaaactaactggctctactccatctagctatgtgtccctaaataaagcacttaactgctctgtgccacaagagtttgccacaaaacacaaaactagtagaatcctaaagatctcaaaaagcctgtatgtttaaaagaatgtcactgtaactttgggaaactttaaggcactgaacatgttcgatatcatcagaagctagaaaaaatgattaggatttttcctttaaactttatacatttgtgttttgtcttggttttgagtatttagtgtttttttcatttttaaatgagctttgtagttagtgcattggccctcaggaacgataatttattgtttttgttttattttaggttaaagtaaaattatgagacttcatatatttctgagtgacttaagactgttcactgggaaaccacagcttgtgcacgatagcactgtgcttgtatcaagtgacctcagagctttcctgcatagaatccttccccaatgctcttaattttctgcgcttgcaggcaggccttaggcatctttctgaccatcctcgcgtatcccagagtgggcctcggtctttgcagaggtgtaccaccgccctctgctggacagattgcagcaagtagcctcagagtcccttctcaagtgtgggtttcctgccccgcctctcctacaccatcagacctgagtggacatgtacagtcttcacaaagggttaggtgaaattgataattttagaggtttgggtattttactaaagatgctttgagtaacatgataaacaagcatctgactttttaacttgggattttcaatgatactcattacaaactgactagcattcacattttggaacactcattccttttgactgattcagcacacttcgccaggtattctccaatcagagaactatttttatctcacatgaattagaagagatggttcctaacagataaagatgatattccaatgagataaaccttctccttctgagttaattagacattgactggtaggctgtattctcaatcattttgccatcaaatattttttgaaaacctactacacacccagaaatcttttaagtgtcagggatatagcaagaaatacaatactttaaaaagatatatgccagtcaccttgtatctatttctgacctgctgaaatataagttctaatgggaatacaactagagtgaccaaccgtcttggttttctcaggattcacaggcttcctaggatgcgatattttcagtgccaaaacaagtaccaggaaaattgaaggagttggttatggtaaatacatctctaccataaaagattgtaaactacactagcatttattgaaaaatagcctttcaatagtgttaggttcatccttaatactattcctctgaatagtttcttctcattaaaaatgtgttgcaatttataaattacataaaaattagtctattgaattgttgtttgcagagcattttcttatatacaaaagagctgagcaaacctaaaatcataaattcaaatttgctctgtgaaagccaagcaaagtaaataccggaaaagccaacctcaatcttgtaagatgcagaaagagcttagattacctatgcagagacactttagaacaaaaggggaaattaaaaccaggaaaaggtatttattaatgaaatccctgagaaagacaaactatcaatcaggtgataacaaacgataaaagcttaaaactggaagatcctaaaattcacccattttctatccaaacaaaacattttctccaggattttgatgttatttattaaagcttgaatacatcttctgacatattattccaaaaaaaattagtctttatttctcaccaataattgtttcccatattttatttaaatatgatcctcttaattttcttaattttgctttagataattttttaaaaaatatataacttcatatatccatgtgtcgttagaactaaaactaaaattcaatattattttctgcttgacatctgctaagaatggagggtctcaaatggtctaactgcaagttcccctcctcactttgcttgtgagaataaagctccctaactgaataactctccttagtgaggtgaccaggcacaatttctgcctattactggggagtaggtttcagttcccagctagcctatggatttattcaaacaagccaatcacgtcgtcttgtgggaaccaggacatcatgccctcttgatactacaaagcctgctcccacagcccctggttgttcactctgttcctggtgatatactccctggcatgcagtgtcctcctctcctgggctgtgagtatatgtgactaataaattgctgtctatcccatctgtccagcaccaggtattgtgtatatggccatcaccttagccctagcgtggaaatcccttcctcactaatggggtaaagaggagtccattaaaacaacccatacctatgatatcttatacaatgctacacaattctcctcagtcttctattttccagtggtttccactcttatcctgcaaaatcactgctgaggtgaagctagaaaatcattgaagtataacaagacattgaaataggcatactttttgattgagtgcaaatgaggctcttataatcactgttgagagatgagtaaactcaaagcttttaagaagctagttgcttcataagaactataagtgacgattggggggactagtattcagaaatttttgtagacaaagaaaagttgaaggaaaaatatgcatttgtttagcaaagattctattttttaaaaatccagttctaaattttatatgctaaatgagaagctgctgtgtatgttcacaaatctacagataatttccttctctgtttttataaatggtttaattcttctttcaaacctaaacttatatgccagaagttgtaagaacaacaaaaaaaagcgaccatccgagttttaataccttactttgctcctactccctgtgaaataaagaaattgataagcaatggactggttacaggtggacattaagaattattcatagaaagttagcagtggaaaggacatgaggaactccccagcccaaccatccagctctcactgaattaatggatgtgaaaatgaggttcagtaaattgtctgtgtgtcagatgtcagtgtcaggctctctaattctcagcccatttctttttcagcaccctttgcccctccccccacttaaaattaattgaaaattgactaaagagcttggccaggttcctaatgtggtagcttagcatattcactgaattgcaatgtaatgcattaagaaagtcgttcctttcttaccctggttcagacacatttctctgagaatctgaaggaccaatacaagatatgccaattagagagttcagaatttatgacgtccatggattaactaatcaataatgctacttggtatatttcaaatttaacagaatttgaaatggcctatggttacatatcaaggaggcataattatacaacatatcaaacatctgtaggatcagcccagactagaacttacctatgcatatttcctgcatgcatgtgacagtgtacactacaaagaataaagtcacccagtggaagcaagaagtacaaatccaaactgaactgaaaatagagctctaggaagcctcagaagcaagaagctattgcacaagatggatccttggttgagaaggggattctttgcaaggttagactagatgagaccaaccagctcaaataagttgaattaaaggatagaccaaatagctaggagaacttacacacacatgcacacacacacatgcacacatgcatgcgtgcacacacacaggcacacgtgcatgcatgcacacacacgcacacacatgcacacacccatgtgcacacacacacgcacacatacacaagtacacacacgcatgtgcgcacgcacacacattcttttttagaaattacgcaactcagaaatgcatctctaaattatagggagaagagaggaaaaaaatacaggttttgtgtatcctggcatctccagaaaatattgaaaaatgaagacagaagttcagttattttttatcatatagatgttttcctttttcgaattccacattaggttatgaaattctactcttcgggattagaagagtagaatcatatagatgttttccctttttgaattccacattaggttatgaaattctactctttgggaaaattgcaaaataaaatgagagtaatttcatggaccttcaaccgtgatgaaattcttaccttgaaaagctaagaacagtaaagtaaatgattgagcaggtagggcctccacaagtggaagactttcccagccaaatatcagcaacagccaaaaagactaggccatttccaaaaaactaactcaacaattaatagtgatttattactcaggaacctgacattaattaaagcaaatttagcagtatccttatcacttgaagttgatgttattgcagttggctggaaagagagtacaaattacttcggcaaggctgccagtcactcacatcctcctaaaatgcctttctaccccagcggaaagctttctggaactctcgaacccctaaattaaattatgttggagggaccctagcctgaatgttctcttaatcttggccatctgcacttactcaaatgtatgactttgctcttttaacaactccaaagaaaatgtatgattaaaagaaaaagacaaatggccagaaaaaagatttgaaggtaaaaatttacttggattgtatagtttgatttgcaagaataccagacttggtttaataattactggatagtaattatagacacaaatatgtaataggtaatatttaattaatgtgttgtaagatgataatctgataaattcactgagttcatttcatttgcttttgtgacaaacataaatcctaattcacaactctgggatacttaaatagtccaaaatgcaaaactaacaagaacgagacaatattaagttcctttatatacattttctaattaccacaaatattgacctctgacttcagcctatattcaaaatgagacgccaacatcttaaaagcttaatatgtctatcagatgtcacaattatactttaaatattttggtgctaaatatttaaatatttggttttctaattattctttaaatcattggtgcaaaatagaaaacagagtactcaatttcaacatatcttttttcccccaaattatctgaattaatcatttggataatatcagatccaattgatagtctcattagatggcatcactgaagaagtgactctgtcgcagctaggaagaccccattgccaatcaccttgcaagtagcagtcactgtaattccatacggttcctgagacagtgtgaatgaaaatgaacatgcattgcgcttcttctattttgtcctcccagggattaatatattttactggttcttacaatatccttataagttaggtactactcttttcccaaagcttacaaataattcaatgaaggcataaaaagcttaaataacctataaacaatcatactactccaaaggaatgaagctgagatttaagcctagatatattatctattgctgcataacagattcttccaaaacttagtggcttaacacaatagcatttactatttcacaattccttgtagcttctctgggtcctctggctctgagttgcttactaggagaaaatcacagacaccccagtgctctattgagagtggatccgcttccaagcccatatagttgttggcaggattctgttcctcgctggctattggagtgaaggcctcaattccttgcaggctgttgcctggaggctgcccttgtgcgctctccatggggtggctcagaacatggcagctggcttccagaatgagccaacaagacagccccagaatgtgagcaaaatagaagtcactgacttttacaacctcatcttgaagtggcatcgcttagaagcaagttattaactccaactcacactcagtgggaagaaatcaaacaaagatgtgaatatcaggaaacagagctcattggaagccatcttaggaactaccacaccaagaatgtttttttgttttttaaaaattaaaaaaaaattaactaaagccttatgatgacatcacttacaagtctgtgctgatggtatatctctacattctaatgagtttgtaaaaccctcattactaatcatgtatatatggcatttctacaattttatttgttttttaacaactacgtaagcataagcctgaattacaacatagtgtaatagtaaacaattcaaaagtgaattctaacttgctactacttcttgtcattttgacctttaaaagcatcagatcttgtagattatctataaaatgtaaaaagtgttaaatattttttgatattatatataaactatgtaaaaaacaacaatttagatgcaagaaatttttgtgaaattgacatagaacataccaaataaaataaaaaaataaaataaaataaaataaaatgggcatggcaatcaaatcttcaccctctgcatttagatggactggtaaacacaaattcaaatacagttgagtcttactctactttataagatagtgaaggaatttcactatcatattaaagtatattcatataaccagttatataaatctaaatagaaaaccaatcttctctagttatgagatggcaatcagcaggtttgtgaaaagttggacctaactaatccaggttagcctcaattccaattatgcctttagaagaggaaattgtgataatatttgctggacctgaattactatcaaaattcaaaaagtatgatcacattcatttaacgaccagccaattttatttaaatcaggactgttcaacaagaatattctatcagccattaatgatctgaattctggtttatcagattaattgaaatatagcacctgcttttaaacagttatcaggcatttgtcttttgtaataagtaaagcagtggcttactattattcattagtcggtttttttgtttgtttgtttgttttgagatctgctatcaagtttgcactctctcccttataagttcaagctgaaaagttctgtagtccccatgaccatcctcacttctgataccaactgcaaattcaggaaactccaagattatgcatgtacttgctagtttgatagaggtattcacagaaactcagaaaagtcattatattcacttatattcacagttgtacgttatgacagcaaaagaatacagattaaaattaatagaaggaagagtcacataaggcagatctgggagacaacaaaacatgcaacttgtagttgtcctcgcccagtgaagtggtgcagactgtgcctatttctcccagaaaggatgagtgacagtacacatggagtctcaccaactagagatgctcacctaagttttagtgtcctgagttttatgggggattggtcacattgacatgacttaccacacggctgatcatagtctccagtccctccagaggtcaaaacgataacatgttgcccaagaataaataacatgttgttccattgttagcacagacaatctggtgtggcccaaggcctcccggaaaacaaagaaactcatatagggcaaggacattccaaggtcttagagatttacctcccaggagcccagggaaaaggccaaatctttctttggacaaaattaattctttactgcacaccagcgaagatcatttttgttccaaggatgtgtctttttggacacatcaaatattctatcagtgttctcaggcactacctttgttcttgttggcatctgtgtaagagaatccagggcctgaaccattgtccactcaaacagaccatacacacctggtccagttttgtgcatgcctcccttttccacagtgtgccacttgctatagttctgaacaaaaactcccttgcccttcggagctttatttatttttaatttgctctgtcattgcattgcatgcaatagaagcttcctggtggaagctcaatgttctgctcagtcccagacacgttttcagccactgtatcattgccttaggttgtggtttccccaaagcagcaccggaggtaagggcttgtgtgcaggagttcacttgggaggtggctctaggaaatagaagcgagtttccaggaagtgtgggatgaatacggggatggggtggggggcggggaggaatccaatatgaatatataatctcatattgagtataaaaatccaatatgagtatgttttccagactgctgctaaggagaatggtgaattattctactgcgaccttttgagggtccacacaatgcctcccaaaactatctaccagagggtggataggaagcattgatccatggcttatattccccattggtcaaacattgttctgctgaagctcactctggccacagtctttggcatcaaaagagaactagggcagaagtcaaagacatggctgtcagaaaactggagagtgcactggaactgtctactccaggtgtggctggagccagagaagtgacctcagccatgtctgctgcaactatattacctatgccagttgtttacaaacgcagaagaatatcagaatcatctggagaactattaaagaacacagatgccctgaattgtagaagagggataggatatgggcctttgtattcttaccaagctccctgggtgattctgatacttatactagtgtttgagtaccactaattgatactccatgcagaccctagaaggacaaggcaggctcaacaggaagtaatttgacatgaattttgttgctgttaacctgaactcatggtaggtctagagtgggatacaggctgccccatgccaattctgccatggactttaccatccccagttgtgttggttcggtccacgtaattgttgttgctgcctgctcagctagcaccttgacaccctaccttgctcttgccaactcactccctcaaagaaaaggaaaagaacacttaatctgttaaagatatttaatgaacacctgctataaactagccaatttgatacacgttttacaaacatgatttcatttgatgctcacgacaaatctgtgaagtaggcagtgttattcagatttttcagatgagagatctgaatctcagagagacctgaagccctgtatctcttgcggcctggattagaaaacagatgttttggcctacataactgcaaagtcttctccattcttgtctttagagacaaggtgtaaccaccacctgcattagctttaccagagcatttctctgttctcctaaactttgaaaaggcagatacctacctagcgaacatcttattttgtagctgtcaaaccagtctccaagtattaaaacagtatctgatcacactttggctgaataggtttatttaatgggaaatttaatgggaaaggcatttattgagcacttactagatgccaagcccagtgttaagtgctttgtatacaacatctctttcctttactgttcatagaaacagggcatcatcagcttcttcttgacctcacagaagaatatatttatctgcctgtaacaaatatgcagtcaggtgtggtggttcatgcctgtattcaggcccattatcccaacaatttgggaggctaaggcaggaggatcacttgaggccaggggttccagcccagcttgggcaacatagtgagactccacctcctccctaaataaataaataaaaaattagctgggtgtggtggtgtatgcttctagttctagctacttgggaggctgaggcaggaggatcactcaagcccagaaggtcaaagccacagtgagccatgatcatgccagtgcacttcaacccgggcaacacagagagaccctgtctctaaaaaataaaaatgaaaaatgaaaaaaaaaaaacttagcagcttggttactcagaaaatagatcctcacagatcatgaaggtgataagatgcggcaaattttattcagatatcttgctggttttattagatctgcttaaatatttttggagcctggaataagacagcggttatttttgaagtttgaaaattatgactgaacttcacttgtttattattcatagatttttgagagaatttttaattataagtataaatgtgttttaaaatgttaagaaggatttcaaatatatctaaatgtttaatggcagtttagcccctatcttctaatgtttattttcattccatatattctatcaataattgattctttctcattttccattagcttttattagcaaagagcaaccttataagcacaatatagcacatctacatttagtgcttcttgtccccaaaatggcaattccattcgcctcagcactcatatgtccatactaagttgctaatctttttcaaagctgctccagacagcttcaaggcaaatatacttagtgtattactttgtattctttgaacagacagcaacatagtttttgacagcttattttcaacagataagcatgaagacattgtaaaacagtctaaaggcatttagactggtgttaatgatttgttttgattctttattgtctacagtgtctgatgtttctgcaccagcttctgctgctaaagataagatgacatttgatagttcggttcatcctatgaaaagtttaatttaattacaaaagggtctgatttgctagattaaaaggtcaagtattataaaattcatttttggtgcagagatttgagaaagctgcacagtgcaaagttcaaacagtcagagaagagtaagacactttagaaaatgaggaaaaattaaaactattggctaatttcattggagaaggagagactagagacacattcttgtatatacagcagttgaacataccacttaaaataatttgttgtcagtatttttttttttagccttttgaaagttttgcatcagggtgatttgccaaaaaaggggtgggggcaaaatttagggaactacgctaaaattgtctttgtttgaaaatagcacgagactctacagaagtattaagataagaatgctcctagacagcacaggcaaggacttcaccgcctcttcccctgctcaccattttacctcaaccacacaagctctgctgacttttattggggattaaatgtctccagacttaaaaaagaaaaaaaaatgcaatgaaatccagatagctgtgcttgctctcagcccactgaagatgagagacaatataagcgaacgttttagggcgacttcatttaagaacatgaagtgcctgagtaataagacggactgtgcccatggtaccagggtcaacttgaccagctgactaaaacagcctgcaacagctaagtgactaccttaagccaaagaataaagctttacagaggtacagctggttagaagtgagtgttaataactgagtgcataaaagagagagggaaacagcacaagtgagggaagctgatggactcacaatttgacttcatcccatagatcaaacgttgatcaaacgataaaagtggatcaaaaatgactcaacgattcctggctagagctgatgaaaaaggggctgcttcattggacaatatggcatgaggaatgtgaggagcagctggtatttcagttccattaaaaacccctccagcttaccgtgggtattcaacttgtgccggcgtcgatacttccacaggggagttttctccaggtggtgcgacagcacaggcaggttgcgccggtggaacttgatattccctcactcatgccacccctacttttaaaagaatctaattacaaaatgactggaggaagggaatgtgtaaatgtcatatacccggaccttccgtaataccaatgccttgtgaaatccaaactgaaaaagtcgtacaaatggatttggacagaaatgctgttgcatggattgaaaacaggctcaaagactgtaaacaaggataatgacaaatgccagtgcaatcaagggccagtggatgagttttccaccagaagacagtgtccagagatgccccatgagtcaggattcgagttcatttttggtcactaggtgtattacctacaaaggagtgaagagtatatggacaaaatcacagccgactctcagtgtgaaggagggtaaaattaataaaaggaaaattacattgagtcaaaagaatgctagaaatatagaagtggaaaatcgcctaaatagttactgatatgaaaataacttgagagagattcttcccaaatttcaaagatttggaacacacctgtagatcaatgtaaacaatccagtttgcctgccattttatcatctttcaagtttttgatttatgctccaatatttatttgaacaaaataatgatataacttatggcagtgaatattcttaaatttgaaaatctctataaaaatgatatttattcatccccaaccctcccacttttgggacccagatttttggatgcaggttaatttgcatgctgatttgccagctgaaaatctcaaagagaaaaacttggaagcacttgtagtcagtcaactaaagtaaaatgtaagcagaaaagctataatgaaaatacaattcataatatttgcacatggaacttataatgactggttaacttttaatgtgaagaataaaaatttcctgtcatgatgaaatgaatcaattaattacttattaattgtacttctattatgtggtgagcactttactaaaaagtcgtttttttgttgtttttttttttttgagaaaggggttgtaccaaagtaaaattagaaaaataaaaacaaggaaagcacatttctttgtctcaataaatcatgctcacaagtagattcttagaatttcagagctaaaaaggacctaaagcttcattgattctgaccttttttattttggatgagaactggactccacagggaagtgaggatccctggctcgcgatgatgtggcctgccagagtccttatgggaatgtctctctagatgcctcctcatagctgtgtatccatgagactcagtggaactttcacttcccattggcttccatcgggcctgtgatcccacttcacctctgtccttccagtcatgctgggcctagcccaacagagccacagactactttgcccaggcatttattctggaagcctgaccaagcctgctgactgggctgggctgtagactgtagcgttcatcagtgattttctttggccagagtgagcaccactctaagcagagtctttcagaactttggagccacttaatcctacagaacttttcattcctgccatcattggcctccacccaaaatgcacactgccatcgtcatctggtctcttacatcctcatcctcatgctactcagtttcctctcctatgactcatccttccattcctactcaatttcccggccaacctcctggcttttgctctcattgttccatctgcctgccctgactacatgctccacctggtgaaaacccactgtcctttcaagactcatcacaatcacctctgcaaagaagaaccatcacctgcctccccctagctgcagcacctcatagaactgacaatcccctctatttttgcattccatatagggtgtaaaaatggagacgattgccaatttgtgagaggtagcagctatgatataaatggttaaagaatttctttgcatgtctgctgccactagaatcaaatccctctaagggcctagatagttctgtaaccacagctgtatcctcagtgcctagaacagtatcttccagcacacagtatgttcttactaaatgtttcttaatgagataagcatctctattggaccattagctccttggaggcaagaataatgtcttctttccccattaccccatagctccgggcacagagttggttatcatatatggctggataattacattaaattctttccatagcgactctctggaaaccttatttccctgtaaataaattcctctgttcattcaagcacttcacccagctctccctctatatagtcacctctttaacgtgattcctccttaagagatgagacttcctattttgtcctcatcaaacaaggttgctcattctcacaactccttttatctgcaacctaaggtcagcctattagtacttctagatccccatttcagctcaatttctttccttcatagacaagattatggaaagagcagtctacattccagtccttatcagccatcagctttcagtccctatttctattgaaataactcttaatagggtcaaatgtaatggactattcttggaaatatttctggctacttccaggctcagttcacgtgtttctcaacttctctgtaatattaggcattgctgcacgaagtatcttcctcttccacttccttactttcttcccacttctctgttctaattttttcagacttttggaagtgccttgccttctattttattctttacctggcattctgtcctgacacctctaaaccttattctctggttcaactaacacctttacaatgatgaacattaagttcattcctcttctaaggtctagttttatttatccctctgtctctggaaagctccacttggataatctaaaacacttcaaaatcagtttttataaggtaggatgcattatgtatttcccctaactcttctcttcctgtagtagtgtcttacttaatcagtagtacccccaattatcctcttttctgagccacaaacctggcagatatttctagacaaccttcatttttttcctctatatccaatttctgccattccacatctaaggcccaatgtctgccattctgcttccaatattactttcacatccatgccttcttcttcatccttatgactactacgtgaaaattggctctaatcacctttttcctgtttaacaaagataaaaatgacttctgcatgagtatttgttatgtgtccttctcccctttgcaggattcacttaagaaccatctgctgtgcccatagtgataatggtttaaaagaattgaaaatcagaaataactagaaatagggccaagaaagagaaaaaaggtagtggggagaaggaacacatccaggaaacaaggagatgagttttttaaaaaaagtttacacctgaactgagggtggaaaaaagttttcagtgtagtgctagggtttgatagaaatagaaaggtgagtgaagaacgatgatctaatactattcctgaaattctaataaaggcttatgttgcatttaaacattttcaggggcaaaagttgtgtttatttgatgatggcatcacaaagagaccggtccacatgaagaccaaggtttacacgatccacagttgaatattgcagtagccttctctctaatgtcctcgatactcccttcaaacttccacttggatatcagagtgacattttaaagatgcagacctgatcatgacaatgccttgtttaaaattttaagcaatttatccaaactgttacaaaaagttcaagctcctgatttaggtataattgctgtttataatatgactcttgcccaaacatgtcaccaaatcttcagacactccccagaactaaaaccattctgaatagttagcagtcagtcctctgaagacacaccactttacatatgattttttcctctattttaaatattctcctttccttcttcacatcaaccaatttctatttgtattcaaatcccatacaaatgactactcttagaagcccaatgcactgtccattccacaaatgactactcttaaaaagccttctttgacacctgagtctgagtcagatacaaatgactactcttaaaaatccttctttgacacctgagtctgagtcagatgattagccccattctcacagtaaacaggtcccataaacttcatgaccctcctttccttcctcctccttgagacagccaactttaccagtttaatttttgcctgtaataatttttttcagagtatttataaacactgtgtgcaatgtgtacattttacaaaactggatgacatatattataaagctgatcagcaagaatatagataggacagtagcctgaattctttcaaacgaaaagatgaataaagacctgccataacaaatagtaagaatatactacctcttaaggtgaactgagtgttagaggcatatgaagttttatacagtcaagtaggtttatgtagactccatgaatgacaaagggaattagagatgctctgaagacagtatttaaaaatcagtgaataaggatgaagtcttcagcaaaggggtcagaaaagccacatacatacttggtaaaagaagactcagcttcctatctcaaaacaaaaatataataaatctcatatggattaaatgctagaatgtaaatataaaaccataaaagtacttgaataaaatatagaaaattatttttatatttgcataaagaaaccccttcttagtgcaacttgaagatcaaatgccttaaagaagaagactagtttgagtagctaaaaaaaagtacaattttatgctttaaaactatattttttcatgatagttgtttcctttaaatgttataaaacatgacttttctgctttgtctctgaccacgtcttcacaaaaatgacagaagagctattgcttcagtcacttagaagaaatatttatagatgatcaatattggcctctgaatgtaaactgcaatatctacctgactaaccaaagaaattgatatctaccttgtttatggaatttttctatcctggaaattctgtgattcctggcacatattgttctattgttttatcacactcttcatgtttatcaggttttttcatatttgtgtatccatggatatacaaatcaatgattttctttcttcctatgaaatacagctgtggaatttaagaatttagcagccgtaattttctattcaccttctctccttaagactaagtaattatagttcctactattttttgcagatgactctttaaatatttcaaaatgctgtctaaattctttatcagtcactgtctctcatttgattagggagcagaagataaagggtagcctgagacggaaatctaagaatcagaagttggaaactgttacccatgtttaaggcttgacaatcaagaccaagaggcagaactggggcatgcagcagctgaggacaaagtagttcccagagctgtagaatgcattgaggccaaatcagtggacacgtgcaaccagccacaatctaaagtgagaagatcgatagaggagagaggtaaggcaaggtcatgatggaaaacttaaacacttctgttaaaagtaagcatctcaagggagactcgtgtgcttcaggcgcttagtgagaggacttggaagaaaattgagggattataggaagccatgagtgtggccagcctgagagactcatgtgagccagtagttaattctatcttttcctaatcaattccagctatctctccagactcagaaactcagaaatgtctccaagttctccttccctcttaaatgaaagaagtgaacatggagattaacttctgtgtgatgaaacataaggaactgcaccaatgttttatttttctaggacaggagtcagcaattttttttctgtaatgggccagatagtacatatttttgttttgtaggccatccaatctctgcacagctattcaactctgtttttgtagcacaaaggcagccacagacaacacataaaagaaaggacacagatgtgttccaataaaactttatttacaaaaaaaagtaatgaattgactaactcctgttctagaatttggttgtattagatgtggttacttacaattgttagatctcaagctaggttggggaaatatttttatttagatacataaatcttcattataacaatattttagaaaggaattgagctatgatgttttaatcatgttttagctaatattaagtgcaaaggaatttgattttgattttcataatttactttctcatttaaaatcagagacctaatatgtctttccacttccaatctgtgatttgatattaatgctaatatgaacagcaacaggaagagtgagttggaaagcatttttttcctttgagacaaagatgagtgaaatatatactctttaaagtgatgttggaaagtgccttttgctggttctctatttcatcttgcactgtggccaaaataagcagcactgactcttttctttcttttcatggtttactgtaagaaatccctctctaattccatcacccagctcaggatgcttagtaaacctgtagagacatactgtccatgaaggagttcaagaggccaagtgatcaattatttgccaaaggagcagaattttgcttacttgcctgtagttttttaaagaaaacaagaaaaattagcaaggaaagaacagtgaagaaattgaagaggtctctgagtgtatcaagcatctacaaaacaatttaattttgtcaatcaagatgttgcaaatggcgatgaataaatcatgtccctatttgttaatatgctgcatcaggttattttgagagaaaacaagggttctgctaccagaatgttttccattactataactttttcagcatttctacttacttatcattaatactttgttacttcttttcacattttgagagctaaaagggcacatccattcaagtcagttcacagttcagttcaatgaatatttattgagtacctactatgtgcctggcaatggtctaggtgattgagatacaacagtaaacaaaacaaagattccttttatcatggcacttatcgtcttgtggaaggagacagttaataagccataaatgcaataaataataagcatattatttaatatgttagaagttaataaatactggtgaattctgaaggctggagcaggggatgaggagttactatatttggtaggggtcaaggtaaatccctgtaaatagaaattgtaaataaaggctagaaagaggagtaataagttagccaagaacatacttggggaaacaagattccaggagtggaaatatctagagcaagtgcccaaaagtgaccgtgtccttggaaagtgggagactagcaatgagcacagcctggctgtaatgaagtgagcccttgtggtgtaggtaaggagttcatggagtataggattacaaaattggggctagaagacactttgaggccctctaatgtcttttattctcagtgcaatgagaagctgtagcagagttttgaacagaagagaaacataacctgacctttgttttaacagcatcattctggcttctatgttgagaacagactgaaggaaagtgtcttagttcatttggtgctgctataataaaatacctgagactgggtaacttatgaagaacagaaatttacttctttcagttctggaggctggtaagtccaaaatcaagacaggtttgtttctctgctgagggctgcattctccagaggggagaaatgttgtgtcttcacatggcagaagatggaagggagagaacccactctcaaagctttttaaaaggaccctaattcattcatgagagaggagcccttatgatctaatcactctcagaagcacaaccttctaataccagcaccttgttgactgggttttaagatgaatttttgagggaacatcatattaaggtcataacaaaaagtaagagcagaaggaagaagaacaatacagaagctattggtataattctgttaactggtggtggattttctgggtgatgagaaatcatcagattctgaacaggaaccaaaggatcactccgttgctgattgaagcgtttgaagacctagccaacgattggaattgtcattttaaacttcatgacttactcaagcacacctatagatcataaatatatactattcttctttctaatatttctaaagatttagaggcagactggaaaaaagtatattctaattgacattgagaagagaaaaaagacaggggttgttaagaacattgaaaagatgttagacaagactagaaaaatgtgttgatcaagtcaggctgaatacacgtgatccacacatcaaagctagactatgggaataggatgagactagggacaagctaggagcacagaaactatagtaaagagaattctagtatgtagccttacctaaaaatgtataaaaattacatataaaatattactattaaaaggtcattatatttcatacttttgggaatgtattagctatccagcagtgtctaacatattacccccaaaactcaccagctttaaaaaagaaacacttataattgcatagcttctgtgaactagaaatctagacacagcttagctggatacccctgggttgatgtctctcaaaaggtttcagtaaagatgtctgcctggggtataagcttctcaaatcggggaggatccacttccaagctcacttgtgtcactttggcagccctcaaatgctcaaggttatctccagattttactgccatgttatgtggttcctccatagggctattcacaacttgatagcttgtttttcctaagaaagagaagacagagagaaggaaaaagagaaagacagagagagacaaagacaggaaaaaaggcatccaagatggaagacacaatcttcttgtatcttaatgagggaagtgacatatcatcatttctgatatattctattcattagaagccccataatcaagagaaggaaggggattgattatagaaggacatgaatcctagaaggttatcactggggccatctttgagattccctgccacggtacactcaatagcacaagaattaagataaggggcccctaaacagtagctacatgagacttatgaaactctcagataattggtgttctctgacaactaaatgaacttaaaatttttactctacctgtattgttggctaatcaatacctagtaattgttcttggtgcacacattcattcattctgaagtttgattacaataaattccatattttctagaaaacaaaaaatcgaggtaactatgactataccacagggaagattttacactatgcaccccaaataacattccacatttattttctaaatatcctaatggaatatattatgatgttttgcatcatttataatgatatattgttttagtttttaaagaaaattataaatcaattaaaagaggagtagaaaatttagtaagaagaaagcaaattttttctccaaaagattttatggtttttttctgatagagtggagacaagggaatgtttaatccattgctcaagatctacatgcaattctttaatatctacaaatttgcttgatatctacctgaaatgttggtcttgaatagaaatacacagctacaaccattttggaaatactttttttcaccttttaaaaaattttaattgtgttaacacatatattatgtaaaagtcaccatttttaaccatttgttagtgtacagttcagtcgtgttaagtacattcacatcgttgtgcaaccaatcaccagaacttgtttcactcacaaaactgaaactctacatccattaaacaactccccattcctcactcctcccagcccctggccaccaccattctactttctgtctctataaatttgagtactctgagtaactcatgtaagtggaatcacacagtatttgtctttttgtgactggcatattttacttagcataatatcctcaaagttcatccatgttgtagcacacgtcggagctgaatactatcccattgtaccacactttgtttttttattgatacatcaacagaaacttggttctttctaccttttggttcttgtgaataatgccactatgaacatggatgtacaaatacttgtacaagttcctgctttcacttcctttgggtatatatcccaaagtggaatttctggattatatcatagttttattttattttattttttgagatggagtcttgctctgtcacccaagctagactgcagtggcatgatcactgcaacctctgtctcccaggttcaagctattctcctgtcttagcctcccgagtagccaggactacaggtgcccaccaccatgcctggctaacttctatttttagtagagatggagtttcaccatgttggctgggctggccttgaactcctggacctcaagtgatccacccaccttggcatcccaaagtgctgggattaaaggcgtgagccaccctgcccggcctatagttctattttcaattttttgaacaaccaccatgctcttttccatagtagctgcaccattttacatttccaccaacagtgtgtaagtgttccaatttctccacatcctcaccaatacttgttattttttttaaagtagccatcctgatgggtatgaggtgttatgtcaccacagttttgtttgcctttgtctaatgacattgaacatattttcatatgctttttagccatttgtatatcttcttcgaaataatagctattcaagtcctttgcccatttgtttttcatgttgctactgtctttatttttattttttatctttatagatttaggggtgatgtggtttggctctgtgtccccacccaaatctcatgttgaattgtaatcctcagtgttggaggagggacttggtgggaggcgattggatcttgagggtggattttccccttgctgtacttgtgatagtgagtgagttctcataagatccggtcgcttgaaaatgtgtagcacttctccctttgctctctctctttccattctctagtcctatagaatgtgcaggtttccccttcactttcttccataattgtaagtctcctgaggcctccccagccatgcttcctgtacagccccaagaaccatgagccaattaaacttcttttttttttaatataacttacccaatctcaggtagttctttatagcaatgtgaaaatgaactaaaacaagggggtacaagtgcagctttgttacatggatattttgcataatggcaaagtctgctttgcccacttttaaattcggttatttgttttttgttgttgctgttgttgtttaactgcaggagttcttcatatgatctggatattaaccccttatcaggtatataatttgcaaatactttctctgattccataggctgcattttcactgtgttgattatgacctttgaagcacagtttttaattttgatgtttcagaaatacttttattagttctatcaattgcaaagcaagaggttgttctatctacaacttagaacttagcagtgttgtgggtggataagtttgagtctaaattagaatttagaaatccctttgcacatgttgatgactcaggtgacaggatcctgacaagttagtttacctaaggaattttgatttgctttagcatgtatgtggtatcataaatgatggttgaggaaggaaggatttgggaagcaactatgagaaggctagtagattcatgtgagtcacgtagcactttgagaggagtgggttaaatcatgcaacacctgtgattccttctcacttgtcacttggtacaacatatttgcctggtatatatttattaaataaattttgtttagtcttttcattttattttttctcaactagatgtatctgctttgcatttgactgagtataggcttcgagtgagcagggagcatgcctaggtaataatcccaggcagcccagtgaaaactcaggtattgtcaataatagtagaaatgaaattttgaagaactgtggacttgtacactgtgaaatgaccccttggggaagcatgtagacaggacatatgggaccaaacccgatgaaaaagacatgcccaaatgcagagaagtatttggtacagggattttgcctttttgtcctgatcctgttacaacctgagaccctaaagaggtacatctcctaactattccaactctaacttgctaagtttctgaccttggcttatacttctagttttgatctctttagtttcttgcctctattagcttgattctgcctccatcatccttttcttttcctcccgcattcatgaattggataactgttagaacttactatgtgccaagaccattacagtcaaaacaaacaaacaattcttgctctaatggagctgacaagctaatgggtgataaaaaggcaaaagtagaaaagtataatagaaagtgacaagtattacgtaaatgaaatattaattgctgtggaagcacaaaggaggatccccaaaacagtgttatagcatcgagaaagtcttcccagaggaaattatgtctaagtgagacttggatggtatatataatttagccagggaaagcatctagtgtagtgtgtgtgtgcacgtgtgtgtaaaattcaaaacaaaaggaaaaggctatacaaaggcctgaggacagaggaagatggggtaatagaaatgagatgagatatttgaaaacctaagtgaagcgcagtgtgtttgaaacattaaaaggtaaaaagaagaatagcaaggagcactaagaagatgaaaggaccacgagaggcctgctaaagaatttggactttaccctcagtgtaatgaagagtgattgaacacttttaagcatatcagcaacacagacataacactagtgttttagaaaagtcacgatctgcaatgtaaagaataagttgaagagagaacaggcactgtcgtttgaacgtttgtccctccaaaatccatgtgttggaaacctaatcctcaatgcaacagtgttgggaggtgaggcctaatgggagatgtttaggtcatgagggatccaccatcatgaatggactaatgccattgttgtgagagtggttatcacagagtgtgttcctggtaaacaggatgaatttgtcccaatttgtctcttgctctttcccaccctcccttgctctctcccaccctcccttgctctctcccaccctcccttgctctctcccaccctcccttgctctcatgtgtgctgtcttgccatgtgatgccttccaccatcttatgatgcagcaagaaggttctcaccagatgtggcccctggatcttggactttccagcctccagaactgtgagtcaaataagcttctagcttttgtaagttactctgtctgtagtagtctgttgtagcagcaagaagccgactaagacacctagatagagaaagaaaggccccttatgaagctgttgaaaataacgtgatggactgaattaggtgagtaacagagggaaaaaagaaaagggtgatggatgagtccatatctaggaatcttaacacagaagaaagggagcagtcaagactgatacttagagttccagtttttgccagtgggcaagaggtgaaatggagcaggttaataaaaaagaggatctcagttatgtgactgttgactttgatgaatctattgaacatgcaagagacatcttgtgggaagagggatttccagttctaacatttagaggagatgacaaattgggggagtcttcaccagatagatagaggatttttgaaaccacaacaggaatggagggagacaattcttagaaattatgcaaattgaaatgagactatttaagatagaaccctgggaaatacgaaaatttcaggattctacaaaggaatctttgatttcaatgcaattagatgggatggagagagagtgtggcattagggaacaaaaagggtactcaacaatggaaagaggagcagggagatcaaaaaggaaatgcttcactgacttagcagcaagacaatcgttgatgcctttggcaagatcagtttctatgggtgttgagagcaaaagccaaattgaaaggggttgaagagtgagtagaactgagaactagagacagtgagtacagacaagtctttctaaaggtttagttgtgaaggagtggtcagaaagtagagaagctggcagaaggtgtgaagctggggaacgtgttattataatgtgagaagattgagtatgtttatgggctgacgaaaaggagaagatggaaaataaagtgtggagacaaaggaaagggtctcctgggaaagcaggagatgtcaatgtgagtacagatgcaaggtttaaccttcagccagggaaataatttctcttttctggggcttctgtttgtggattcagtggcaggaagttggagttctattttctctctgaacaaacaggcaagtgtatcaggcaatagtgatgaaaacagtaaagatttgaaaagagaaagctgaataaggaaatatgaaaattgttaaggccagaaattaatagtgttatcaatgtgtacagttgtgtaaacctcttcactaacagaaactaagttagacacacagaaacagggtacttggatggaggatttgctaggaggatggataaaacagaaatggagctaggttatttaaaagttgccaaaagaatgattgaagtgagggtccatgatatcaaagcaagacaagaaagaaaaagacaagatggaactaatagagggatcacaggatgccagccccacggagtcaaggagaggaatggcaagaataactggaagagagggctcgcagagaactgtggtcagagctgggcattcagagttaatgtttcagaggtgggacagtttcaaatgatgacaacatctgggtgtgctcatagtattgggttactaaagacagcaacgttgctggaaatgaagtattcaagcaagagagtggctaaaggagtaggacgtgaagttaagagtattaaaaaatgagttagactctaacttattgaagttgtgagagtgagtggccggatcagtaggtgacagtaaaaatgaaggctagagaatagtataacctgatgaaataatctcaaattagtggggatttttacataatgctaatgcaataacaccgtgaaagcagccttggggataaaagtggatggctgacatattggacatgtggaaaaaactaattcctacatgcaaaattatgttcttatggaagagtctggttcctgtcacatcaagaagagggtcaataaagtgtcaagggtgaaaaaagggatttttttgtatgctttcaaatggggatttgaggcagtgtataggtggtcagggggaaaatcagccaaaaataagaagaggggaaatgtgactagaaggagaatgatagcaatatgttatatagtttcaaatagctagaataaagacactgagtattcccaatgtaaagaaataataaatgtttaagatgatgaatatgctaattacactgataactatacattatatgtattgaaatatcactatgtactccataaataagtacaattattgtatgtcaattataaaaaaattaaattaaattaaattataaagctaacaagggtggcaggtaatatgcaaagttttcaaaaaacatattctagcagttcctggtggtctgctgcccagtctctggagactgaatgtagctcaggcagaggacgtgggccttggcagttgatccgtagatactgaagttgtctcatgtttgctgataaccagtgtccattcccacacctccatcttacgactgtaagctattgaaatgttccttcagctcacataatcctgtgtccaacttcaatttgacaaaatgatcttggtccacaattatttgcagttttatttgtttctcttaacatgatccctctaatgacttagtgtgcagaaatttttcctggcatagtcagtcgatatttgtcaatgacctaatttataacctagtagtttactaagagtagtacagacagactctgttcttctactactatctccatccacaatcacctgtaaatgtttattgatacaaaagtaaaatgttccttacaggcatggtttcaattctaaatttcataagactgaatttttaaaaatccttccaaaatatataaaggcattccagatttaaggtatgtttactttgtaaaatagcagagaaaacataaagaaatggaagtttataatatgcaaagttgtagatatttagaagtattcaaaagaaggtctttggcaagatatttttgatatttctaatcaaaagataggtaagtgctaatccagtacttatgcaagagaaaattccctgaaaaaaatggaaaaagacattcataaaatgtctcaactttttatgattaagttcaatagacaaaaactttgccaaattactgtgaaaatttctaaatgtttattctcatttctatacttaccttattgcgatccagtatcagttcagaagcaggtatcaggctatgaatcacattttgagtagcactggcttagcggtcttcatccagtgtatttctagaggttcactactaattcctatggagacctttgttttccagaacaaaaattaaatcaagatgcagatgaaagtcaatacctccctcttaaaaatagaaatcttctttgtattcatcatgccttaatattgtattctcttcttacaccaaatagtttctctgggtgcctgggagaagaaagcatgagtaagaacagaatgaaaaaggagacctaggagatatgctgtattgttgatttatggtcatatgtaacatttatatgccatttttcatctgtttcttctaaacgagctcagctcttactaatgatcagtgtcctgatagtcaaggtgttggcaaagtttccttaggagcaggactattgttttttctcctatatcaaatgacagaccattgattctctaaggaatgtcaaaaaactattacagattttaagactaaaccgatagtgtgaataataaatttaagattattttagtgactcattccaaaatttgaggtaatctgcttttcttctgacaataaaaagagggtaaatcggcttaatactatgggtcagggtggaggcccagcatggccctgtgatattctaacccttgtgggtgtgagttctcattgagtacgctgtccttgccttccattccttgctattgcagtgtcatgcagcttacttgctctctgccctgtgccacaggccttctctcactcggtagctgacccttcatgtgtttagctccaatggtttggaatccttgctttcttttctcaccctctgaatcacttattatcttcctaattaaagcacctcttcattagcatatgatgaaatgcatggagtagtgtggggcaccttgttttaaaaggcctactaatgacacataagcaagattctccctcccagtaccaatgtctcggcccctgtgactcatgatctagctgtctagtcctctctatctctatttctattttatttatttcttagaatccatagctttttccatatttaccatcaccttgaactaggaaaatgaagtatggaaaataattaaaccattaaaatgttaatatttttctatactagctttcctgcagctggaatataatgagctaatgaagccaaaatttttttcaattttattttttaatcctatgctatatagtttgaaatagcaaagagcaaaatcaaggttgtaaaaagatgtacaatgggtgattgagaagatactctaatggaaatatgggttatagttaatgctgtgtttgttcatttttaaaatatcatttagcacttactatgttctaaatctttgggatacaacagtgaatgaaacagataaacatattctagagaattaatgcagagagtattgttaaataattcagaataacatttaaattatgtttaataacataatttcagacccaacatataaaaacaaactgattttgtaaaataacattaaacattatttgggtactcaataaattggagtgcatctgcttgaaatataagagacttatgacatcctggagaatgttagctagcttcctattgggggaaaagtataatttgatatagtgttcttaatatttttaggaattcatattctctttaattctgtcaacgtgcttctaagtactgaaaatcatattaggaaaaagctggcattcaaacatgccataatcattatttttagtctaaatttttctgtatttgaaggacttactccttgagcaagtgcttactaaggaatcctttttataaagtaaaatacaaccacatattaagacacagttgttctaatcatgcatgtggctattttattatggctgttatataaacactacaccatatttcgccaacagaaatgcaaaaacattatgaaagtgttacttctgatcagatatgtatctgaagccgttgagtttttatatcagggattgtattattctggccacctggggaaataagcagccaggaaaatctggcttggactgggacaagactaatgcactaatacttatttatgaaagcatcatatattctgctcttccgtgaattattgcagtaagagtttcactgcagtgtacataaggtgaaaataaaagctggaatgcttcactatgtgaatgtgccacaacctaccactgaagaaaggttaaggatttttctttgattttttaaaaaactaaaacaaatttatttagagtctcaattattgctcagttaggatagagacctttcagcagggtaatatgttgttgcatgagcagatttttttaacagtaaaaaagagtattcactgaggttttatgaagattaatcgatactctggatagatattagattaacagtcttcagatccattagaaaaagatgggctcagatagtttaatttaatatttttcattttccaaagattattcatgtgaatatccttgatgagttcattgttgtcttcaagaaaaagcccgcgcttccttttagagctatataatcaaatgacccatcaaattaattaatagaattttaatctagtgcagctagcatgctaattaacttgtcaagtatgtacacaaagtctccatgaaagttatttttgaaagtctttgcaagtgtgttatgtgtgattgcaagtgcatgcagtacctttgaagcaatacacaagaaccttggaaggaacaatagctggttccactgaaggaggagaactgggcagctgagaagcaagggaaaaggaagacagacattttaaattatgtgtcttttgtattttgagttctgttccattagcatatattactatttttaaaattgttttaattaaatatttgcccaagatgcaacaaaagaaagagaaaggtaagagagggacaagaaaagggtaaaaaaggggatgtgagaggggaggaagagagaagcagggaacgcttaacatgctgttgtaacccactattacaaaaataccctaatctgagatcctctttccttcctactcttctccccatgaaagttccactcaaactaatctgaatctagttcaagtcctcatcatctctcgcctggttgactgccacagacttctgtcttccctgactctgatgttatctgaaccatctgcagaataaagatctctgcctgccccgcctccatcattctcatttcctcctaccttacgcttgaaactctagcaacactcaactgcttgtttctttttcagcagtgcatgtatttcctgttcttcatgctattgctcctgtggttatcaccacttcaaacatgctatggccttcctttgcatttatgacattgtattgtaattatctgtttgtgtgaatattttcctccctggactgcaatggactttatttacattagcaggatcagggtccactcttctgtcaacacgtaaggctgctcaacacgtattgatcaacactgggaaagacagcgtcctccacctaactctctgagatcttatgaaaggcattttagctgctatttccctatttcataaatgtaaacagcacaatataccaaaataattcatctcttgtgagattatccactagttaatgtttccattctatctagaacccaaatgtgctagtatccatatcatcaccgttgacttcctcacatttttattatggaatttgtccaacctactcaaaagtagagacaataagtaatgagccccatgtgccaatatcttgacagtttcatttcatgtattccccaaacaccgatgtttaaagcaagtctcaatcactggaacgttttacctgtaaacacttaattatacttctctatcacaataaggattttttaaacataatgaccgtgacagtgattgatagtctatctatgacattataatctgttttaacattttaaataattatattaggaagtctaaattccaaaatcattttcaatctgtttaaataattggggcatcactatactttttggacgtttctcttcagtaactggaaagggttcggcaaagattaacaatctgcatttttgcagatggacaagtactgtgtgttcaggtcaggcctgaagagtattaaaagaactctgaggaggatgtttcaaatatcctggctatgccactcaaactaatgctattaatcggctcctacctctccctcaactctcatagacactaaattcctatctataacttttcagcaaatattattctctttacttgagttatcaaagatagccccagagcaatgaaactattcagttccaaaaccatcacatttactacgattgtcacaacaataatcctttcctaaacgtatacattgttttaaatgtctcaggacactcagagtcaatgttagtttaatttagttactttaaaaaacgaaagttgaagtcaataaatctcaccatgggcaacctgtttcctagcttgggctgcagacacaacaatttatctcttggagttacccgtaactctctggagctatatttgtgactgtcctaggaatattagctaaagcccaacaaagaggtgaaagttctgttgcagtcaaagtgatacttgtccttacagagagttaaaataatatatcataataatagaaatataaaaaatatagtaggcatgtatatttatatatgtgaaagactgaatacatatgagtagaaaattaatgccaataatactcaatgtacattactcctcctatcataacaatatgtataactgcctaataaatacttcatatgacataaaaaaagaaaaagaaaattaatgccaataatccaactaaatccatcaatcattgaaaaaattgtacatttttctattgtttcaaatctgctgatttttctggttatgtatgtactctttagagaatgttaaaaaaatgtgttaatgctgacaattaacttttaggaaaaataaaaccagaaacaaaaaatcctgttgtaatatcctagtaacgcctaaagaaaatatcaacaattactttgttttgctttgttttgttttatttttcttttaagctgaataaaccatacgagcctattgcttggtttgtcaccagtagatgctgatcatattacatagtttggcaatggtttttaatacagatacaaacatacatataatttggcatgagtaaaggagaagcagtaattacataatttaaactgcttacacttaagtaagtatagatgaaacattaatgaaccatgccatggaaatacttttgactgcttaaacattattttcaaatttgcttttgaaaaactaactttgaaatatttaatctgctgagagctaagccatcagtttttgtgagtttatatacaataggaaggacaaagtatgacagaatgatctccaggttaagggaaatcttacataatttttactactactgatgctaagctttctctttgggtagtttcccaatggcattttaatttactttatttgacttcacaatgcttaggagttgggcaaagtccattattacccattattctctgaagttcagaaaaattgcaaaatgcataacttctggtatgctggaaatttatacaccttcatcaaggtgttggttacattagtgtaaactacgtaaatttccatcaagctatacaattacaattaatgtaagctatactttaataaaaatattaaaaagaaatacactcagtgacaaactgagtaaactagagaggctttcatatactgtgtaacaatatttaaatcctattaaggagatagcctctagaagcttcttcctgaaataatatgactatttagttagacagaaaaacaaatgaacttccactaaagtggtaggaaattttactgaccgcaccttgctaaacaaaatgcaagataattttcttttctagtagtcaatgtccacagccctcatagaataagataatgcaaaagatgattttattgactattcactgcaatacctaattacataagtagctgctcatttagaaaaataatccaactagtcattccctttttttctgtgggattcggctgttctaattcttggcccaatggaccaagaaggtggtcatgaatcaacaaattattttgcctgcttaaattgcatgaatttacaaattggttattcagaattaatgtgaaaaaatttggagagtgtgttgggtcagtgtataatgagacatctgtagctttatggtagtgggggcagagtggagtgggctgatgggcctttctgtagccttatgaggcagaagttacagagcattcaaatactttctctagtgaaaatgtatggtgcccaagtttaatatgtcctactgctctattttggtaaacactgcatgagtcactaaaccatagagaaagatttcagagaggttacatgggtagtggctatagctgacataggttatcatgtcaaaggatatttcagccacagctaacatatagaagagtcacacaaaaacatgcctctataaatgaatatttgcagatctggtagggcttgggcactggaactaacatattctaaactgggatagcaatactctaacagtaagatgaaaaaagtacaaacctttatcaaattgtgtatctttttgtatagcttcacttaaagaatattagttatatactcaggatgttccaagagaatgaattgagaaggagctatcttggaaatttaagaataacgttaatccaagtgacttctagacctataaatagtaaaaaatgcatctcaacataatatgcatctggaattacctattgactcttcattgatatttctgtggggtggggggaggggggagggatagcattaggagatatacctaatgtaaacgacgagttaatgggtgcagcacaccaacatggcacttgtatacatatgtaacaaacctgcacgttgtgcacatgtaccctagaacttaaagtataataaaatatatatatatatatatatatatatatataaagaaacttggttcctcaggcagcagagatcaatggagactttcagcacggaagtggcctatcaggtctgtcttttcagaagaacactgtaatagaacagtgcacgctgctcacttccttcattgtaaacccaaaccatggttctttaagttcaagtgcaataactttggaataacaaggtatcagtcatctcaattaccacccatagtactataaatgagtgccatctttctgaaaagcagtttggtgccttagatgtcttcaaatatgcatgccctattgtcctggaaattccacttctaggactctatcctgaggaaattatgaaaaaggtaccaaatatttacgtacaagacagctcatttttagcattgttcgtaagagtgaaaagttgaaaacccaaaatattcaataaaaagtaactggttaagtaaattaaaaaaaaaagaaatttctcataagctgaattatagtgtcgagagttactaggcttcctgatttttcttattaataattctggatatgaacaaacgaggatagaataaaattatgatccttttgtagtttacacatactgtcagtttaatgtatgttggaaataaattagacttacctttagcacttttgcttcttggaacaagaagaataaattaaagatattttttattagtcactcctttatagaactgatgagatattagaatacataggcattgttttgtgctagagagaggaatcagggcaggatgacagtcacttacagagctacaagccattgctgtattacagtgtgttagtctgttctcatgttgctaattaagacatactcaaggctggataatttacaaaggaaagaggtttaattgactcacagttcaggatggctggagaggcctcaggaaacttacaatcatggcagaagggggagcaaacatgtacttattcacatggcagcaggaaggagaagtgccaagcaaaagaggaaaaagtcccttataaaacctatgaaaccatcagctctcctgggaacttactgccacaagaacagcagcttggggtaacttcaaccatgattcaattacctttcactgggtccttcccacaacacattgggtattatggaaactacaattcgaggtgagatttgggtggggacaaagccaaaccatatcatacagtcacctgaataccttgttttaaagtagttggttaatgttctaggccactgtggcatctaacttactgtgtgtgtgtgtgtgtgtgtgtgtgtgtgtgtgtgtgtgtgtgtgtgttgtgtacatttgtgtgtactctctagttttgtctcttgatcccatcaaataatctctcttgagtcctactgaatttttgttgaaatatctatacatttcaaggatttttcaactataagcagattatatggcaactctgaggagaattaaatatgggttatacgcagtgttggcatctgaattaattctcttgagcatttatttttcatataatattgtgataatagcttcttagtttttttatttcacatatgcttatgtaaagtttaacaagaatagacaacagttgctaacttagaacatcaggttattaaaaactgtagtgtacagtttgaaatattatttttcttcaaggcagaaaaagctttctggcgtaaactcaaaagctgcatttccttgctttttgccttaaagtaaaactgacagctggagttcaagaccagcctaaccaaatggtgaaatcccatccctactaaaaaatacaaaaattagccgagtacagtggcaggtgcctgtaatcccagttactcgggaggctgaggcaggagaatcgcttgaatctgggaggcggaggttgcagtgggccaagatcctgccattgcactccagcatgggtgacagagtaagactctgtctcaaaaaaaaaaaaaaagaacagacagccatgactgaaggaaataattatgggaaaagatgtagaggaaaataaaccaagagagaagagacatgtaataactatgaattaccactttatatggtcagcatttttatttgtggatatagtctgactatgtattttctgtacataaataagtacggtcatagtacatgcaaaatatttataaattacttgtcaggtgcaagtacttatttatatttgatgtttattgctcctatcaccacacaatcgaggcactttaaggatattaaaaacacaagttaggtctcaccgtatgtataataaatttcacttcatcaaaataatcctatgtctgaaatatagttttgatagattgagtttcttttctaagtaatgaataaaggtggccagtaaaatattgtttacaagcttccatgttaagatggtgggtccaaaaatttaatttctctcccataaaatttcacaaaacgagcaaaaaagaacaacaatgacagcaataaaacccaatgagaaaatgttcaacagcaaccaccaaaccagaacaagagaataacatactgtaatttaataagccagtccaaagaaagcaacaaatgtttccagaagaaaaggaagaagctcccaaccatgccctcatcctggaaaagagccagtcaatcctccctaatgccatataaatgttggcatctttttattttgattgaacacgagtggaaagtgctccaggggcgaagtgggtgaagttaggggaaataaattacaagacatctctgatagaaataaagcccccagggttacccagagaaagaatccttccccagagtatctgccactaggtggagtgaaccctggaatagggcagaggagacagaagagctcagagttctaataaagatttcatgccacttcctctcagctctcctgtgtgcatgacttcctccccacctccaaagtggctgaaatttcctcaagctacagaaaattgtctacagcataaaacattcagcttttagactctagtttggaggtgcaaaagatgggtttcagaaaatgcaagaaagcatcaccacactgtcacaggatctttggggtgtcacatttccagccagtaaactctgtggccaggggcacctttgcctgagttttgctcaggcccactgggctccttccacccacttggcctggcaggctgcgcttggatcatgctaccaacctggatcctccacctgccaagtgtgagccaggcatggagtggtgaggggtgtgtgagagagtgtggggtctggccactgtgcatagccagatattctggctatggtagggcaggcagctccaggtactggcacgagtgcctgctcactgcaaggctatggctggaccaggtgtactgcaaatagctgccacagctgacaccaggaaacacagtggtgcctggaagcttggagacaccaggaactacagagccccaaagaaggtgtcactgccctggctcggggagcttctaggcctgggctcccctaggggccacagctcttctctccttcttgtcacctgcaatatggcgagtgaggtgcatgtttcagcactgcctgtgttacagctctttcagccccaccatttggcaggtcttgacttgttgtcccgcatccaggaaaaatgaggtatgtggacaagtgagcaaggcagagaggtgctttattgagcaacagaacagttcagaggagacctgtagttggtagcttctctcctcaggcaggtcgtctgatgaatctgcagctctcagcagagaggagaccctggagtgggtacctcctctacgcaggcaggtcatcctgtcttctgctgagctctcagtagagaggagacccacagtgggtagcttctctccagaagcaggtttgtcctgtcatcttcctgagtctggccgagtccaggatttgtatgggcttcagaggacaggaagtgcatgctgattggcccatgggtgattatgggcaggccctgaaaaagcgccattagttttcattctggtccatggaactgacatcctgacccgcaggcttcttgggtcatccctggcctgaagctagtgtttcactggggacctgcccctttgcagccaggagcctgtctgcctcctgctgccattaacctgccatccacagagcccatggcgcccaggctgcttgtgctgaggggcacctgcaggcctgtgccaagccgcccttatccccacctcgacctcccttccatgcttgtcagtgcccaaagtccagagggggctgaaggggcagggggctggcatgtcagtgccactgtgaatccctgcagtatagccatttaaatattgagggcacattctagatgagtcctcatgtggcagaagtggcaaacaaacccccttgggcctctttttttaagggacatcatctcatttatgagggctctgaattcatgatatgattgcttcccagaggcccaatatctgaatatcatcatattgggggttaggatttcaatatataaatttgtagatattcagaccataatagaccttccaacctgcatagctatagcttaattaatgttcacagtcatcaaaaaaataagactacagacacaaccacagtcttataagaaggcttgcggaaaactttaatttcctatctcccatcagctttatgaataactgaatcattgaaaaataaaaaccgaaaatcttatttattatatattttattgaaaactggttagcaacagataaattacaatagagcctggatataaaaatgagagaagaatgcagacttacaagcttatagagaaagtcaaaaaggagcaagtttttgaaatcagattttatgatacggaaaaaaaatttcctttttttgccaacaggattatttcgaataataaatctgccagtgccaatcagaaacaccatttccacaatatttgcatgcccctagttgcctattttatacatatcgactccttgagctaggggtattcgtgtctctaaaaggaaaacgagtgtattgtataggttaatatgttttctgtttatgggcacaattcattctcaacttctgtaatgtctcaggaataattcataatattgaacagctggtgacaagtaacatacaaaaattatatcctacaatttccgtatgttctgaacacggtcttatcaatagctgatagaacatttagtagctagtcagctacgggactttccaacctagaaggcctcctcctccctaccattcagtattgtatatctcagggccttttaatcatttccctgcatcttggtacctgaaggacacagcaaacatatattcactgaaaatctgaaatgacttgaacttgatggtgatctagagttttcttctatcttcctactgatacaggagtgctgggaagggaggagtgtggtctctttaaatgatacagaatgaggaagggaagtgctgggtagaggaaggcatggtccctagctagggctttacccccacggacctaggtgagaacaggcactcctgacttcacgcccaaatgttgcatttcccaagaccaccctggctcaccacctccccatccaaggtctataaaagcccaagatcctagcaaggcagagacagaagcgtctggacattgagaggacacatcagtggaagaacacacaagcggctggttgtggagagcatactggtggaagagcagcagagagctacctgcactcaataaaactttgcactcattctccaagaccatgtgtgattgattcttctggtacaccaaggcaagaacctggagatacagaaagtcttctatccttgcaacaaagtccaactgagctggttaacacaagctgcctagagagggcaaactaacagagcaccctgtaacacacgcccactggcacttcaggagctgtaaacattcacccctagacactgccgtggggttggagccccacaacctgcccatctgtatgctcccctagaagtttgagcagtggggcactgaagaagcaagctacacccccaccacacaccctgcaagggggacaagggaacctttcccatttcactacctactaaactcattaagaactcaacaaaatggccattatgtcattgttataagtctggtcaaactctttttattctctagttgggcagcaagattttactctacaatccactgcagcttcccattgatgaattttgttctttgaactggagaaactgtaagcacaggagtacctgttgttttcaatttctaccttgcataaacatttgaagaagtttgactaaagataataatgttacactttttttggctttacaaattagaattaaacaatgatgtctttacttgattaaatcttaaagccaattaatggcaaacagttactgtgaaattagtcagattctataatttgaaagaaacttgcaatgtgatcacacaatttaatatttatgaataattttctcatgactaaagagatacctgttaatgggcttctaaaaatgagattcagtaattatcacttaaatagctcattgtctgtttcagaattttaccagtcaagctttttttcatttctaatgcagaattagaggagggtggagagaaaccgtagtcactattctttccattatagttgtccactatcttatgtcagtttcccaaaggtatggtggagtaatcatggaggtcacctttgcttctggaaaaaaaaaagcttcatttaaattaccttagctagtaccaatttttttttcaattctattttagtcctttccccccctgctgccacctcattgttttacaagtaatgataaatgtgataatgagtaatgacatctattcatggaaaatgtgaaaagtctgaagttacagtatttttcattaggaaaatgtgtctctagcagagttaggcaccttgacttaatcagcctagctccaactctgtaaaagaaatgaattttccttaaatttcagagtccccttcttcctcctcctccccattttcactcctaatagctatataagcttgttcatggtagtttaagtgtaaagaaatgtttcaactcttatttgtatccattaaaatgcaaatgatgtagggttttctgattgtttaatccctgggagtttttggatatgaaacattgagtacatgttttcaaagtgaattcttagtatccttcatctgctcccttccaatatgcagaatacaatgaatgattagtgttaaaccaggaaagcaagatgtatgtagagattaaaaatgaccttgctttcttgatctccatttgggactagccatatggtgcagagaggctatcttaaaaacgtgaggtcacccatgttatttctatagctcttccatatcaggatttcaaacaatttatctctaaattgtcattgatagtatgttatttgacctccaactaaaataatactacctatgtaattaatgtaagaaaaatgatccaccataaaaatctgtcagttttatataaatacagccttttgtcagagggttacttgagaaaaaaatggagagttgttaaacatttgaataccacgcattgatgcttacaaatataacatatctatatagtaacaatatcataccaaacatatatgcaaatttgtaatatgaatattactagttaaacatttgaataccaagcatttatgcttacaaatatatctatatagtaacaatataataccaacaatataggcaaatttgtaatatgaacattaccaagataaagtttaaatgcaacaaaaaagaatgaaattaattttgttatagtagagaggtaggtaagaattttttaaaaaaagaaataaacatatgtacattatatacatatatgtacacacacatagttttcttggcttctgaactttcactgagtaatatcaactgccttttttaaggtaacatcataatccaaatatctctttctgcaaattcaaggcaaagcaatatgatacccatcttcattatctttcctttctcctttctcatcaccaaggctacagtgtgttatccagatttgtcctttcttggctcatttcaagcttcatcaaacgttacctattttgtgtatcatgtcctcaagtcaccagtcaatataatatctacctcctactttaatatgtatgtggatacatatattactccatgtaacatctggggaaaagaggtttaaaaccacaactcttaccatgacaattcactgtcatggtaagaatgccaggcaggctagtgtataaggtactaataactagtacctttctgagcccttgtcttacttctcaaattaaccaacgtaatgagctttctactcttccaaaaagtaagatctactttgaagtgtggatattcaagaaccatgttcccaaccaacatccaaagccaaagcaataagcatgttgtcaatttcgactctttctgtgaagactctatcaaacatagattcttggatctaccaaaatatatctccttttccgtgatcttgttttcactttaactgctcgctgcaaaaaaaagaaaaaaaaaatcttagctacattacttttaaccataatagttgctttctgatccttacaaataatatttgggtataaacaccatcaacaaacttctcttttccagtttctggcccaggatacagaaagcctttatcatttcaggctcttgcaagcattttgcaatcactttatgtcccaggcaataaatattaattccagtaagtgtttacttaaataagtttgtggccacttgcagaacccattatgtaacactccctacaactctctgcctgccaaaatatcacactttgaacaaggcttttggttcaatcagtgtatcagcccaatacatcgctgcttctagcctcaacatccttcccttctttccagaggaagaaggtggtaaagtcgtttccttccattgctgtgaatcaaaagacatttgaccatttgacaagggcaacagaatgctgcctgcctgctgtctatccaaaaacaaggaggaattttgcaggagtgttgcaaaataaaattcttcattcagaaagatttttattcagataaaaaaattggttaacgaatgcagctttaattgcttctagagtttgaaagggattgtttttataatatgctattactttcacccaattcatattataaaccattccaaggctttaaacaaaaactaaagggaacatatctgtaaaagtaacaactagccttgaatataaacttggaattaaataaaattatgttatatgctacaaattaatcaaaaattaaatatttatatcatcattatttaacttattcacttcttgattaattcatcaattcacatgttttagaaccacaatttatgcttatgtcacttcattataaaaagaaggctacatagaacaaataattagaaaaagtttctattcttcatacacatacaagagcttgcatgatacactgaatactctagataaagttatgcctttcccattaatagatgtaaagatgcagggatgaagaggaaactgaaagttcctaaaaattagtccttatatctcatatgcctggaaatgtaacccaacattctatcaaaagagatttgtagtggattcatattagagagagacactgaaagccaagcacttaaaacaaatttaatttgccaaaatttcaaagtggaaaaatttcagaagccttctgacacttaccagtgccataggaattatgcatttactggcatcatgcatttgtagtctgaagaaatacagtaatactacatggatttctgatatattaaaatgtcttctttcctagggtgctaaggcaagtgcactctatgttggttgcctgagctcgtagccttatcactcttaagtttgtgtttagtaagtatattattttgaactagaagtgaggttggttttgtagttgttaacgatttgctttcttgtgtacatttgatctctctaaaaaagatacaagtgtactgaggactgggatggtatctttcatatcttttgcacaatccaattgcattagaaccatacagtgctcccggtgccagcatcacagctactcatcaggactgaattaggaatccaacccattaactggctcggtgaccctggacaattcattttaccttttgagactcctggtgcttcccatataaaatgaggtgactacattctttctaagatactttccagttataaaactctatgatgcttaattaaggaagcaagtaaaggaaggaagttatatgaatgtgtggggaaccgtgatacccaaattcacagcatagactgccaaaatccttggcaaaactattgatgtgctggaaaaccagaggggagcattatgaaaaagcaggcagagaccagagagaaatctgctccttagagctagagcaacgtggatccaaatttgtgagctacatgcttttctttttttctttaactgaattttccaattatgtgcaacctgggtggtaaaaagcctgaagtgtccaagtttaaagacaaacctgacagaacagctgaaaattaggaaaattcatagaaacatgaaaacaacagagagaatgatcctaatcattgcctagttcctcatctctgcccaaatttaacaagcatggaggaaatcaacagggggagaagctttaaaagcaacagtaggaagacattagaatgggctggaatgataaacagctgtctaccatgggaaatgagtagcgggcaaagtttctagattgattctaggcaacgtaacgcaatcatagaactaaaatccaatcttctgaacaatatgatgactctagagttgctacagtgtgttacctataatatccagattttaatccaaaattagactatgtacaaaagaaagaaaaaaatcaggaaagtatgaatctatcctcagggtaataaaaactattctgttgtgagttttctaagatttacctgaaataattcatcttcaactctaagtaattgggatacatgtcagatacatattataatgtctagaacaacttccttaaaaaatgcaaagaggctgggcatggtgacttatgcctgtaatcccagcactttgggaggccaaggcaggcagatcacttgaggctaagagttcgagaccagcctggccaacatgggaaaaccccatctctactaaaaatacaaaaaaagtagccagtagaagtggctcaggcctataatccaagctgctcgggatactgaggcaagagaaacacttgagcctgggaggtagaggttgcagtgagccaagattatgccactgagctccagtctgggtgacagagcaagactctgtttgaaaaataaataaataaataaaacaaaacaaagctatattgaggagggctaagagagaaattaaagtggaatattaaaattgcttaattaacataaaaacagaaaaagaagaaaacaaaagtaaactaataaaaaagtgaataagacaaataaacgaaccaaaataaaacaaatgttgaatagcagacctgaatagaatgctatctttaattatattaaatataaatgtactaaacatgccaatcagaagacagaaatcattagtctgggtttttaagaaggcaggacaaactatatgttgcatataagatacattttaagtaaaaaatacaaaagtatgtgctcaaatctttgaccccgacatggtttggctctgtgtcccacccaaatctcatcttgaattgtaatccccatgtgtcaaaggtgagatgtgtaatctccacgtgtggagggagggaggtgactggataatgggggaagtttcccccatgctgttcttgtgatagtgagtgagttatcctgagatctgatggttttataagtgtttgacagttcctccttcacacactcttctccctcctgccaacttgtgaggaaggtgtctgtttctccttccaccatgattgtaagtttcctgaggcctcaccagtcatgtagaactgtgagtcaattaaaattctttcatttgtttataaattagccagtctcgtgtactatctttatagcagtatgagaatgaactaatacaacctcctattttataatacaacctcctattttataatgttatttgtcttcttattgagttgtacgaagtctttacgtattctagatataaatactttatcagatatatattttccaattgctttttatatctctatttttcctcatagtatcttttgaaaagcaaaaggtttaattttgttagaatccattttatcaatttttgcttttatagtttgagcacatacctcagtaaagatacactagtgccagtaaacaaagcatcagggaaatacaaattaaaactactgttagttactagtatatatctacttgaatgactaaaattaacaagtctgacaatactaagtgttggagaggatttgaagcaactctagcactcatatattgctggtgaaaatgtaaaatttcatagtcactttggaaagcagtttaattctttataataaagctagttgaaaacctactgtatgatatggtctggctctgtgtccccaccaaatctcatctctaattgtaatccctacatgttgagagaggaacctagtgggaggagactggattatgggggcagtttccccatgctgtcctcatgatagtgggggtgttctcacgagatcttgttgtttgacaagtgtctggcagtttcccctggatgctctctgtcttttgctgccatataaaatgtgtcttgcgtccccctttgcctttcacctgattctagatttcctgagacttccccagtcatgcagaactgatagtcaattaaaccttttttcttcataaattacagtcccatatagtatctttatagcagtgtgaaaacagactaatacaccatataatagcatttctactactagaaattgagcctctctaaaaaacccactgatttccacacaaacactagcaaacaaatatttgcagcaaactgtattcataatagcctaatgtacaaataatccaaatatccattaactggtgaataagttttaaaattgtggtatgtagaaagaaataatatttagcaatttaacagatgaatctcaaaaatactgtgctaagtgaaaaaagtcagcccttaaaggctatatactctatagttccatttatgtggaattatggagaggacaaagtataataacataaagcatctcagtgattatgaggggtagggtgggttagggaattgacttcaatggggcattaagagaattttgtcgggaagattgaaatgttctatatcataattgttgcagtaattgcactactctatatatttttcaaaactcaaagtgcatacttcaaacttatgaattttgttgtaggtaaacaacacctcaatgtaaaaaaaatgttaatgtttaaatagatgagcttgatgagtgaagaagaaatagaaaatctgaatagagcttcaatcatgcagtttgatttcatagttaaagttgcattccttcaacaacactgagaaagaaattctaaaacttacaaatggaaacagaatccagacagctttacaagggagttcatatgattttacagtgaggttagcaaaggaaaaagatgcatcaaagtctagaaagtcgaggcaaaatctctcttccaggtaggtcttagaatagattgcatagaacacattccttgttctagcaacaaaatgctgcaatatatgtgctgggattttgcccaggatagcccacttgagatttagagttcaaggtttttactgggggacaggtcacatcagaactttctcccggtgtagccaggaatgattatcaaagttctagactcctaggaggaaagcaggtatttaccatcaatcacactgtttgcacagtataggcaaggaggactcagtgcctgaggcatacaagacagccggattctttagtaacaaaaggaaaattccaaagtcaagttttcagacaccagccaaggattagcaagcccttcgaagaggaacatcagacctgctacaagactctttcctataccataggggaggcacttcctttccttagctgcagttcaatctagctggatttttttcccccaaaatgtgtagaaatggcctaactaaatcctcctcaaagaaactgatcaccagccaaccagcttcatctactgaaatgtcagtttcacctccacaagtttcttcaacaaagcttttgaattttagtgattctaacttcttctctttgttcactaaggctaggagtggtcactgctgcctgcgattgctatttccacaacttaatggttttttatatttttttcctcttctgagttacattaacaaccacttacttttaaaatatttgtatggaatcacgtgtgttaaagtaatttctgtggttgttctggatgctgactaataaaagagcagaggcatcttcctttggcaaaagttactaacaaataagaactagtaacatatgttcattcattattctctgttttgggtactatatttgtggtatgaggcaactgtgacagtggcagcaaatttgcttatatgacctatgatgacacctgaggtaggtgactgtgaaatgaaatttcagcatcaccccttatccccaaaatgctctcctccagctcttccaatgacctttcaagtgcctgttatattcttccctccttgtaacatctagagtgatttttgtttcctgaactgaattctaatagatatataggcgatttatcaaaagagtgcagtaaacaacatactcagtagtgaaattttaaaattattccccataaaatcaggtgtgagataagtatgctccttctcaccatttctatacaacattgcattggaagcaatagagctgaagaagtaagtggaaaatggtagggaagaaaacaaaattgtcattatttgcaattgataagataatctacataaaacccccaaacatagctttatggaaaattagtatgtatcacagacataaatacattcgatgctgcactgtgtctacttttgtaagacaggaagaatatatctgaaatgtttagtaaccttttttcaaaagcagatgaaattacatccaaaatcatcaataactgaagaagtctaatagggcttacttctagaggattccaggtgaatggatacaaccttgagctaattgcacaaaagaaattgtgtctataagcaggtcaattagcttgtttcactagaacacagttaaaaaggtagttctccaatcactttgattttcagaagagctatgagcttgattcttaatgattatttaacatagttgagctttaatggttaacttgaaattttaaaaccataaaactttatagaaaatgaatatcaaaagtaaagaagctgttaagaccacagtcactgtacataggaattttatctcactgctgtaaatcgtgaaatcctgccctcaaccatagtgtacgaacatggccatttcaaagatgcacctctgtgacatttccctggatttctccacgtaggaatttcagcggttattctctgcaggtaattgcagcttccagaataaccccaggtcactgaaacaccttggctctacaaacaacccattattaggcagattacatcaagaaaatccatcctgctactgctgtggagatgtgaatttatgacattgaagaaaaaaaacatgcaaagaggtttctggagtctctctgtggtgaaggcaatgctctatggacacattttattcaatcacacttaatgaatgagcctcactccttggttttcttcatcctctctgtctcgtagaatccttctagggagatatatatatatatatatatagtagctgtgaattaacatttgttctctaaaaacacaaaacttggtttctactatcatacacttaatacaaaactcccacagttcgtctacgaccattgtctccatcagggtcaggtgagaggatggaaaacatacgagattttgaacagggagaatgtaatgtaaataattgtcaaccaggtatgaagttgtgaactaggaactgaaaagataaaaagaggacgctaatgtatcatggaggcagcaaatgtaggaagcagataccatccttatggttaaaaaaactaagggacatgattggatttattaaaatttagaaacttagaggaggggtcttgcataactgaaactcagggctttgaggagggctactggttcagttgctcaacagattctggtgtctttgagcttggaagagcggtcccaaggggctgagacccagactgtagaaaacaggatactgttagcagatgctggtgattgttaactgtgacacagtgaagcttgtttcacaagtgtttaaaaaactgttaactgaattcagctactgcatacagaattactactcctgcctgggtgaagaagcgctgccaaaatgatgcttacaggaactgcaaacggacaggaagtcaacaaggagtaaataagaaagaccaggttccttctttctcctccagtcctagtctccgtcttgtgcccccttttggcagagcataacaggaaatcagggggcaaagcagaaataaggtttgcagagttccagcttcaggatcatgaagcaattatagaaatgtggtttgagctgagagacaatagctgagtaagtggcacaaccatacaccgaaaagtcttctgaaataactgaaaattgattcatgattaattacactacggtatagctaaactgcttatgtagttttgtaacttactaagaagttgtataattcagcatagtctcatagttttaacaaagagaaagagataagcattcagtttccactccctgttcattatggaatacaaggagatacactgtgcatctgaatgtccactttgattcctgtgtgagaaatatcgaaccagcttgtggcttccaagaataaaattagtaaaataaatggacaaacatgtaaaagacacaaaattaaagcattcttatcctccaaatcagaccaaataaaccttatctcaaatgatatttctaaacagtatacccacttctaatccccctctacctcctgacacatacttaataacaactagaatttctaacttccacatacaccaaaaaaaatttattaccataatttataataataaataattaagaacatctacctattgactttcttatcgtgtgttcaccactttaaaaaatgaatcaactttcaattatctatttctttttgctacatgataagtgactagaatgtaatcagttttttaatttttattttaggctcaggggtacatgtgtgcaggtttgttatatagttaaacgcatgtcacagagatttgttgtacagattatttcatcacccaggtactatgcctagtatccaatagttattttttctgatcttgtccctcctttcaccctccctgctcagttaagccccagtatctgttgtttttctcttcaccaaaaggtttttaaaacctggttttggccagcgtgtaaaatcatgtgctaccacatcttgttgaaaatttaattcacatttccatgcaggacagaagtttggttttatgcaccatttatgctctaaaatatgctctatccttcctatagaaaatgcattcctagaaattatctctagggagatagttacatccatataaaatagatttagctggagattattttatcaggttttttaaaataaagcagatgaacataaacctaaaagttttgcatagaatcctggttaaataaattacacaagtaatgaaacactatgcagtcagtaaacatgactggttagacataccttttattaacatagagcaagctataaaacattcattcattcaaaaaatatatactgagtatctgcattggccaatgtaccaaagagtgacagaagaaaaaaaagtccctattgatgtaaaacttcacatatgttcatatgaacacacacacatacacacacacacagatgtctggtgggaccttctcaaaaatattgagtcattcgctaaaaaataaagtggttttctcccagtgggggactatagctgatttttacttcagtcttttatgtcatgtattcgcatgaatttattttacaaaaataatatagccacttaaaaaaatcctatacctattcaaaatcgaaggcaaagactattactaccactaaaccttaccagggttactggctgaatgtgatttcctttctctcagaattgctttatcatttggtgagtatcattttggggaattcagaatacattggattctgaattataattagttttgaatttgtctttccttgaggatagtgacactgtcttgtgtaactttttgtcacctataacatgtaaagtagagcttagatgctttcggtgtgtgctcaataaataatgtgttatatttctaatttcactcaccatcaaattgtactgggcattagtcagggtaactgctttgcccatagagtttataggttatcatgtgctacttatagcccatgttgaagagcagccttaaagagctatgttttgtaatatgtaaccccaatctccagacacagctgattgtattgagggtgaatacttgactcaaaggcagccaatccaaaacctggccagagcatgacctggaatgcaaatgtgatcataggctactcataagagaaaaaaaatcaaactggctaataaacctgtaaagccttttctgctttattaacagtgaaaatgcaagctaaaaaagagacagacatgattttattcccattggattgttgaaaattaggagtgacaagtctcatattattgaaaataagaagggtgataatatctcatattgaaaagaatgaagggaaatggtcacctccacgccccatgggtgggaatacaaaaattattaaggcaatttgacagcatctaccagcatttacattatgctcatcaccttttaacccagttagtctactccaggaagacaacttgcaaaaatagccacaggtgcacaaagatgaggcaaggattttcattgtaatattcaaaagagatacatttccatcattagggtgaagtaggctatgttattttcattcattagaagaaaggcagagattcaatagaaataaaatcaaacccaacatccttactttgaaccgcagtcctatataatttggtccctgcatttctgaactcatctcttctctccttccccaccactcacctgcttcagaactcactggcatttgcacttgctcattcctctgctcgtttcatatctccagccattctcagggctgattccttctctccagcatctctggttaaatgttacccccagggagaaatttcctcatcaacctggcctcaaacctctctatattttctctcttcttattttctttgtctaatttaccttctcttgacattatattaaatattaagccacattttttattgtccatatctttcactagaatcaaaacttttatgggcaagcaatttatctattatttatcactaaatccccaatgcctagagtgatgtcttgtaaagaataaatgtatgtttgataaattcatttattctacaaaagtatatgatagaactgtgtattttaacatagaaaaatatctaagatctattggtgttgccaaaaaagacacaaatgatatgttcacttttatgttaagaatacgtgagtatttatatataggggtgtgtatgtgtttaacacatacatgcatgtaattatctagatagagaactaaaattatatatatcaagttgtaatctctgccaaggatagtgtctatgggaagtaagaaaatgaaactttgacattgtactctacatatttctgtatccatttaatgtttttacaagaatagatttatatacttctcatgaaaggaaaacaaagaaagaaaagtaactactaataatgacaaatgacatttaaagctcttgtaataggcaatactttgagcattacagatgtattaactcatttaatcatcacaacagccctagaggatatattattattattaatgttaatattactatttcaattagagaagaagctaaagcatagaagagctaagtagcttactcaacattgcacagtgtccaggtagcaaaaccaaagaaggaaataaaggaggaaagaatgaaaaggaggtaggaaaggatgaaggaaagaagaaaggattcattaatcagttaatttatcagactgaatatggcaaatgaaaagtggttaaagttgtgaatgcctactatgcaaaattgcaggttatttgaaagagaatgaaatgtaaggaagattttcagctcctgtcctggggtgcacagctcttccagaattcccaagattccttgaccagatggttcagtttttcttgattcccacacacgtgtcctgagagaaaccctgcggcgcacaatgacttgagtgaggctctcttctttgcctcaataccttaaagtagaatggatgtttttgacctgcagaaataatgccatgtgttagaaaaggttacttatttcccaagtctgttaaagaggagaaattatcaaaggaaacttaatattggtcagcaaaacagggacagtttcgaaattttcaagagatcatcaaaacaatctgtgtgcgtgtgtgcacatgtgtgtgtttaactatgcactgatgctttttttgcctttctttcttttgtaagcttacctgattggtcattcgctttttaaaatcctgcagtcaagtataaccgaattgggtgaatataagggcgcaaagaaacaagaacaatgcaggagaagacatgagaacagatgtgcctcatgttaaattaaaacgctcctttcttctgaactttcttactaaaattctgcaatttgtgtaagacggattccatttagcactgcttttcattttccttagagcttctccatgtgatgaaagagagattgtgggtgaacatctgagataagcatggcattaggtctccttctatctctttatttattaaaagaatggatcatttatttctttaagactaatataggtttgtatctgtaattcatttatcaactttaacatttcatttgagatctaacagagatggatcattgtgtcatcataatcttttaattagaaatactatgttaagtgtgcccttaaatgaaccctaaaaatcttcctgcactccaaccacgggtgttacattacaaagcacgctagtttactgaccatttcaagattgccttgtggtttttatgcttcagaacatgaggtttattggtagtgacacaggatgaaatccaagcatatatgattacaaatgtccacatggcaaagcttggctttcaaaattcaaattgtctacaaagtagaaactgctatttttaaaaagccaaagaaaaagtaaaaaaataaagtatcatatctcatttatagatcttgttccttcctctgaaagatactgaaagcttaggtagcagagttgttttaaagtatattctcttttacagttaggcaaagatatgatttaagagaatgctcatcactatagccatgccttttatgctgtgagctattgaaatgtgaatacaccactaattctttgcaactaccagactgtaaaccaaacatgccactttagtaaatgacccttattcttcatttctgttccttactaaagagtactagctatttgtggaaaccgcaagaaaacacagaaagtttggagaaaaatgtttaatctgtcgttcccctaaggcaatttgcatcctttgaagctctctctgtgtaatgaaacaaacaactagtaggaaggtgaaaattttactcaaacagtttttgagagtttacatttttgttttttttcatggaatgctaagtaattgatgttatttttcctcactgaattctccagttgttttaatgataggtaattagaaagaagaattcactaagaaataaaatggtttcatgaagtgatgaattgtaaagataatttctcttgagataaatttagcagtgacactaagaaattaattcagcccaatcataataataacaactcccatttactgaatatttactatgtactggccactcatctggcccactcagagctgagtggcttcagcaataagcaagtcattgctgtttgccaagatcactttcaggagagtggggatagaagccaggtttcaatggattaagaaggaatgggaaaggagaaagtagaaatagctatcatggacacaaaattacccatgaagggaaaaaaaagaaattcagcagaagctggtgggaaatatggaatttaataagaaagggtttatttatttattttttttttttttttttttttattttttttaaagataggagagaactgagcacatacaaatgaaagctgggatagcactttgaaggtacagaaaggaaataagataatctactgagcaaggcaactaagggattaggaagagtaggagggtttcaggaaatgacatcccctctgtgctgtagatttcactgaaccctactggacatatttatccttggggatcttataagcacctcaactcatcagttccatctccatgcccaaaccctctgcctttgctttctttcttgaaaaattgcaccattatccacctacattcctaaaccaaaaatctaggcctgatgctggatcatcccttctctttatccttgcatcttattaccaacttatgttcattttatcttttaaaaataagtattttaataacagatgctggggctgtggagaaataggaatgcttttacattgttggtgggagtgtaaattagttcaaccattgtgggagacagtgtggcaattcctcaaggatctagaactagaaataccatttgacccagcaatcccattactgggtatataaccaaggaaatagaaatcattttattataaacatacatgcacacgtatgttcattgcagcactagtcttaatagcaaagacatggaatcaacccacatgcccatcaatgatagactgaataaagaaaatatggtacatatacaccatggaatactatgcagccatgaaaagaaatgagatcatgttttttgcagggacatggatggagctggaagccattatcctcaccaactaacacaggaacggaaaaccaaacaccacatgttctcacttataagtgggaactgaacaatgacaacatataaacacagggagagaacaatatacactagggcctgtcaggggtcaaggggagggagagcattaggataaatagctaatgcatgagaggcttaatactaggtgatgggttcataggtgctgcaaaccaccatgacacatgtttacctatgtaacaaacctgcacgtcccacacatgtatcctagaacttaaaattaaattaaattttaaaaagtatatattttacttcttctgaagattttttcctgtatatccaatgtttaaatattcaagtccaggttagatgccctgtaatatccattggaatctcatcagaaaaataaaactactctagttattccagcctaagggatttaatacaaggaaataactgtacagaggaagaaacaattgagaagttgaggcaactgagggaataacagaagagagcaaactaccacctctagagtttcaggaaccagtagaagcatcattactagaaacagtggtgtactggttcatgtttaacatccagctctctagggataaacaaaactttactgccaatttctgtggtgttaatatcataccatggctgatttcaagataccaacatttcactaaacgcagagctgggaagagatgcagagattcagctcttatgagctcacacaccagaaaccagaagctgagcctgtcaagcagaatttggagccatgcaaaagaggccgctgtttccaaaatgctacctgaatagagcaagaggacaagtacattggcttctacaatcctcccacctttcattctccttttgagtcctttcttccgtcaaactcagccaaaatcttgccaagcctgggaaatgtagcctgaaagtttatgtctcctgagatacagagcagagctggagtagggcaaggaatggattcaagaaccaacggctaaaagactgacacccacacctcagagctcttggagaacttctacctctgttataactgatctatatgctttgtgaaggcagggaccactgcctagcccagagtctaacattcattaagcatcagtaaatattttacagaataaatgaatgatttattagcaaatataatgtcagcatttaataatcagaaaatcagtgcttctttgtgtatatatgacttcctatgaaattgccacatttcttggtatagtgcagctataacttgtcaaaatagcatacaaaaatattatgctgtttgaccttttctaataattctcatttgtgccttattcctttcatcccatcccatgcagtttgttggaaaactgaaagcttttgtttgatctgatggctcttgtaatttaaacatttccaaattatttacaaattgacgttttaggaattatcactaaaccagtatattctacaagtttctctctccatctgggatgtccatccattgcctctccatctggcaactccaaagcccttagttagaattttcatctctattgctagtacctgccgatgggcagactgtttcaatttccaccagtcctatgtctggtctgacttctatttctagctatagtcaacagagtcaaatgtgttccatttgaaggaccacatttgtagtagaattttcccgtggatctaatcccaaaggggcctttgattcatgtgcctacctttgttcaaatatatatttagattgatttataaatcttgccaaatataagcaaaattggaaatttgttaaagtggtatggatagattaatcactagtatattattgcaataaaaagagtccagcctgacctgaactcagctttgatttgtatggaggcgacagtgtgttttaaaggaggaattaagaaatagggaggtggaaaggcagagcaagataacgaatagaagcctcccccaattgttcttcccataagaacaccaaatgtgacaacactctacacacggaaaaagcacctacataagaaccaacaatcaggagagagatcacagtacctagttttaacttcatattgccgaaagaggcactgaagaaggtggaaaagacagtcttgaatggctgaaccacctctctcccatcccccagcaatggccgcgtggtgtggagagagaatctgtgcacttatgggagggaaagcacagtgattgtgcaactttgcattgaaactcagtgctgccaacacccggcagaattcaggggatgcccacaaagggagtctttagaccagctctatccagagaagaattgtccatttcagcagtcgcagcttgagtttcagcaagcctcatcaccatgggctaaggggctctggggttctaaattaactttttttttttttgagatggagttttttgctcttattgcccagcctggagtgcaatattgtgatcttggctcactgcaacctccacctcccgggttcaagagattctcccgcctcagcctcccaagtagctgggattacaggcaccgactaccacggccagctaattttttatgtttttagtagagacagggtttcaccatgttgttcaggctggtttcgaactcctgacctcaggtgatccacccacctcagtctctcaaagtgctgggattacaggtgtgagccaccgcacacagccctaaattaactctaaatcctgtctaggtcacaaggactgcaacttctaggcaggtcctactgctgtgctggcctaagagccagtggacttggaggggcacatgaccagtcagggtggcaaaggcagtactcgcatcacccctcccccaacctcaggcagcacagtttgcagctccaaaagagacccctttctttcacttgaggagaagagagagaagagtaatgaggactttgtcttgcagcttgtattccagctcatccactttagtataaggcatcaggcagagtcctgagtctcctgttccaggccctagctcctggatggcatttccagacataccttgggccagaagggaatctactgccttgcagggaaggacccactcctggtagaattcattacctgatcactaaagagcccttgggctctgaataatcagcagcagtaaccagatagtacataccataggccttgagggtgaggctcctctgcttgtggaaaggggagaaaagagcgggaagaactgcatctcatggtttgagtgccagcgcagccgcaatataaaagagcaccaggtagatttctaaggcttccaactccaggccctggctcccaaacagcatctctggacctgcctggggcccagagtaactaactgctctgaagagaaggacacaaaactggctggctttgccacctgctgattgtaggaccctagggccttgagcgaacataggtggtacaggcagtggttagagcaggcctcaggcaagacccagtgctgtgctggcttcagcacaatcccagtggtgctgaaaaaaggagagaacagccaaacaaataaaataagaggtgaaaaaggagacattataactgataaaacagaaatccaaaagaacataagagcccactatgagcaactgagcaactatatgccaataaatgggaaaatctagaagaaatggacaaattcccagacacatataacctaccaagactgaaccaagaagacataaaaatcctgaagagaccaacaacaaataataggatcaaagccataataaaagtctcccaacaaagaaaagcctggggtccaaaggcttcacggcaaaattttaccaaacatttaaagaataactaataccaatcctactcaaactattgttaaaaaaaaaatagaggtgaaggaaatcatccaaactcattgtctgttgccagtattaccctgataccaaaaccagacaaagacacatcaaaaaagaaaactataggctgatatttctgatgaacattgatgcaaaaatcttcaacaaaatactagcaaacaaaatgcaacaaaacattagaaagatcattcatcatgactaactggaatttatccctgagatgcaaggatggttcaacatatacaaatcaatcaatgagatacatcaaactaatagaatgaaggacaaaaaccatgagatcatttaaattgatgctgaaaaagcatttgataaaattcaacatctatttctgataaaaactctcaaaaaacttggtatagaatgaacttacctcaacataataaaagttataaatgacagacccacagttaatatcatgctaaattaggaaaaactgaaagcttttcctctaagatatgaaacacaacaagaatgcccacttccaccactattattcagcatagtactgaaatctctagctagagcaatcagactagagaaagaaataaaggtcatctaaataggaaagaaaaaagtccaattatccttgttcattgatgatatgatcttatatttggaaaaacctaaagaccccacaaaaaaactatttgaattgaaaaacaaattcagcaaagttgcaggatacaaaatcaaaatatgaaaatcagcagtatttctatatgccaacagtgaacaatctgaaaaagaaataaagaaagtaatcccatttacaatagctgcaaatgaaattaaatgcctaggaattaacttaaccaaagaagtggaagggctctacgataaaaactataaaacactggtgaacaaaattaaagatgacacagaaaaaatggaaagatatttcacgttcatcaattggaagaatcaatatttaaaatgtccatgctacccaaagcaatctgcagattcaatggaatctctatcaaaataccaataacattcttcacataaatataaaaaaaatcctaaaatttatatggaaccacaaaagacccagaatagccaaagctatcctgagcaaaaagaacaaaactggaggaatcatattacctgatttcaactcatactgcagagctatggtaatcaaaacgagatgctactggcataaaaacagacgcatagaccaatggaacagaatagagaacccagaaacaaattcatacatctacaatgacatcatttttgacaaaggtgctgaaaacatacactggggaaaggacggtctctttaataaattgttcttggaaaactggatatccatatgcagaagaatgaaactagatgcttctttccatatacaaaattcaaattaaaatggattaaagacttaaatctaaggcataaaactatgaaagtaccacaagaaaatctccaggacattggtttgggcaattatttttgagtaaaactccacaagcacaggcaaccaaagcaaaaatggacaaatatgattacatcaagttaaaaagcttatgcacggcaaagaacacaatcaacgaagtgaaaagacaacctacagaatgagagaaaatatttgcaaactacccatctgacaaaggattaataactcaactctataagaaaagaaatctaataatccatttaaaaataggcaaaatatctgaatagatatttttcaaaagaagacatacaaatggcaaacaggcatattaaaagctgcttatcatcattgatcatcagagaaatgcaaatcaaaattacaatgagatatcattgcactccaggtaaaatggcttatctccaaaagacaggcggtaacaaacactggcgaggatgtagagaaaagggaacccttgtacatgttggtgagaatgtaaattagtacaaccactatggagaacagtatgaagcttccacaaaatctaaaaatagagcttttatacaacccagcaatcccactactaggtatatacccaaaataaagaaaatcagtatattacagagatatttgcactcccatatttattgcagcactattcacaatagccaacatttggaggcatcctaaatgtccatcaacagatcaatggataaagaaaatatggtgcatatacacaatgggttattattctgccataaaaaggagatcctgtcattcacgacaacatagaactggaggtcattacgttaagtgaaataagccacagaaagacaaacttcccatgttttcccttatttgtggtagctaaaattaaaacagttgaattcatggagagtagttctactactccaccaaaagtcagattgacctttccaaaaaacagttctgatcatatccaccaccttttctatacatcctttcatgaagtcaaaatgctcttagaataagaactaattcactcaatatttatttagcataatctctgatgcaaatctcttctccagtgattactttgtaaggccctcattgtaaacacatgttcaaaaaaattcaagaaaacatcaaataaaaataaaagttaaatgacaaaaactggataaatgtattttcaaattatatcataaataaagtgttagtacctcttatgtagaagaccttctggaaaacaagaagagaaaggctaatagccctatagaaaaatggacaaaagatacgaggaaagaacccacaaataaacacaacaatatgctcaatctctaatataataaaagaatgcaattaaaagtacactgatgagattggcagaaatccaaaagtttgacaacctactctatcaaggtgactacagggaaataggctctcttagactttattggtaagaagaatctaaaatgatataatctttatcatgaggaattgagttataactagcagaattatatatgtatttatttttcaatctcccctctataataaccttgtctaggaatgtctttcaaagataacactggggaaacggtatatggggtgaagggttcatgagggtcgcttttactcctctctatacttttgtgcttatttataaatacctacaatgaaaggttttaaaaattaatctttgctggtgttttctcttgaccttggtatcctatcaccttagcctgggtttcccaaaaagtgaaggctaagagaaaagctgccgcctgactggactattcagtagtgtgatggagggagggtggtaaacaggaaataagagagggtcttcacaaagatgcattgttgagttggccaccacgtgaggctgctcatatggaagggctttcggagaagtgtgatgaaatgaacctcggcaacagacactctcagcctcagagagaccccagggcagggagtaagtggcacatctggtatacccaagtccttgtcctgctagggtacccatgggatgagaagtcaagcctatgcagagttagctttcatatctgtggctacacaaagaggggaggcagggagaatttgatatgtggcaagagagctgtatgctgcccccaaaaagggattactaacacttgcatataagttgtagaacttgcctttaatttgatacaataaaatgaatcatcggattaattttgggaatgttgatattaaacagccaaactcctaataggtaattttatgattgatgtctttaccaagatatacagcttcctcaggagagaatagtacatattaaaactagaaaattatactatagatgttaagagttcaaataatatatgccaatctataagaaagccagtcgtaaatagttttcactgatgcatgccagaatatttaaatatttagcatatttaatacattaaatgtggtaatgaagtgggacaaccatcttaaatctatatacacacacatatgacataaggtattgtaaaatagtatagtataatctatatatgtacataaatattgattttgaaaagttgataatacaaagagaagagaagtaagctggcatcacatgtgctctgtaagcagttactgaggcaatgatacaacagccaagggctcattttgaagtgctgattatttccttgtgccagacagaagtgacaatcaaagtgatttactctgagaactttgcattactgtgaaatcatttatgcactgtaaatgatttgaatacccatgaagtccgtaggtccccaaatcatgttcttttgcatttccctgcctttcttccaccaaagacagatatcatgtgaagtaatgtatctgaaattcataagcagacaaaatttctactgacttcaatcatatgggccaatgaaaaggttatcatcttcccaaatggtctcccaacctatattagtttcctattgctaccgtaaaaaataatcacaaatagccacaaattatgggaaattatcatagccaccttggtggtttaaaacaacagaagtttatgtactcacagttctagaagccagaagtccaaaatcaaagcgacagtgactgtgcttcctcctgaggctcttggagagaatccatcccttgcctcttctggcttctggcagctgctagcattccttgcattccttgacttgccagcgctatcattcctatctctgcctctatcttcacacttccttcactatgtgtatagcagatctccctccacctcttagatcttcctatgaggacattcaagatgacatttagggcccacccagctaatccaggtataccttctcatctcaagatccttaatcacatctgtaaagaccctttttccaagtaaggtaacatttacaatatttgcatgttctagacattaggacctgatatctttggggccacaatgtagcttacctcaccaaccatgagttattctattgagatattgtctgtcatgcttattgccactgtaaaataacaattaaaaaaaagtctgcacccccctccctattcacatactcatcctaagattagcgataattttgtttccaagacagaagacagtacactttttctgaaaagggccagataataaatgtttaagaacttgtcaaccatatgatctctgtcataactgttccaatagtttcttatatgtgctgtaacaaattgacacaaattttgtggctcaaaacaacacaaagttattaccttccagttctgtaggttagaattgcaacagtgttctccctgagttgaaatcaagatgatagcaagactatgtttctcctggaggcttgaggagaacgtatgtttccttgaattcaccagcttcacatgtcctggttcatggtcctctacctccatctccaaagccagcaacaagtccagtgcttctgagatgacatcgctccaacttttttctctgcctccctcttccacttttaagaactcttatgattacattgagcccacccaaataattcaggataatctccttttaaatcaattgattggcaatcttaattgatctgcaatcttaattccccttttttatatcatataacattcacaagttctgggaatcaggatgtaacatctttgagaaaccattattctacctaccacaaggaacatgcaaaacctatattttactcccaaccagaacttagaaggtggcagaacctctgatgagagacaaatgtagagacccaaagaggctaaaatgtaaacaccctgaccttgaaagcagctacaaatttttttttcttcaactttttttttaagtaaatttcagggtacatgtgcaagatgttcaggtttattacataggtaaacatgtgcaaatttcttgtatcaaagaggaccatatgacaaggcatctctggaacccaaccagaacagttttgcagttgtcaaccaagccacccagaaacaaaaggaacaagaaagcaatgttgaccatcttgaactaagaaccagggacctcccctgttcgcacagaataatgtgaattaaactgactgattcacagtaagttaatatggaataaagtttcacctaccttcttacatgaaggtaagaaatgagttcaagtaatgactgatattggatgtcctgccggtcagataattgggaactcagacacagagtacatttggtttagaaaaatagaatatggcattcttattattgccagcataacacagaacatactgatatcgactacatatcttcaaaatatataatacgttttattcttttccttctctgacttcctaatattgcaaccttcctgctcaaaagccttaaatagttcagcaattctgagcctggtattaaagatccctccccctactcctacactaagatctgattcaattttacctttggtagtttattattaaatattaacttttacatattatgatttccagctgaattatattttgtgttccctgttattaaatatttttataatgttttcctgctttgaaagtcttttttcaccccatctttatacctctaaattctacctatattcaaggtcttttgcaaatcctatttttttcataaattcttccctgatctttccaactgaattattggggaacccccactctatttacatagatcttttattgctatagtcttctcacagtttatcagtcaggtgcagtcagaaaaaaacagaaaccacactagggactccaacaaggaggatttaatataggggctggttatacagatgtttgagggatgaaagagcaacagaaaacactaaaggttagcatgaaataacaagcagctatttctcatacagctggaagaataaaaaaagaagaggttagactattaaagcttaggatctcacaaaagaggacttacataactgtgacttggatttttttttttttcaaaaaacagggtcttgctctgtcacccagggtgggtggcattggcatgaacatagttcattgcagccttgaaatcctgggctcaaaagaccctcctgtctcagcctcctgagtagctaggactacaggcaggcatcagcacacctggctaattattattatcattattttattttgtagacagtgtctcactatattgtcaggttgatctccaactcccagcctcatgctatcttcctgcttctgcctcactgggatttcaggcataagccaacacaactggcaggactcaaacttctaaagagtaggcaatgcttgacggtggttagttcttatgaaggagagcaacaaactggtttgggaatttgaaggcagttggacattgaaaccaactggcactcttaagataactgtttctgcagggatgaaatgttattgctggagaaagctgtcaccatgcaggtgagagcaagaataacaaacaggaaacaggaggtccttcctcctttcttcctgtgttccagtcactctagtgtttcttggtagaacccaacaggaggccagctggcaaataaatcagggaaatgtttgctgtgtctttagccacagaatggtaaggcattctggaagacaagtgaggaaagttttctgaggtggcaattccttctgtagctttaaatttttatcatatagaagtcaaaggccaggtgcggtggctcacgcctgtaatcccagcactttgggaggccaaggcgagcagatcacttgaggtctggagttcaagaccagcctggcctatatggtgaaaccccttctctactaaaaatacaaaaattagccaatgtggtggtgggcatctgtaatcccagctaccactgaaggccactagagtcatccaaagcatgttggtgcaacaggatccatatttgccagagggatctctctcaagaccttggcaaggccagactccacagtgggagattcccctccacagacactgaaatgtctttgaaaattgcaacagttcattttctctcttgctcgatgatttcttgtgtcattccaactttatagcttatgcaatttacttttttctctctctcttttcaaagaagagagatccctctagtggtttgagtgagtctctgtttttcagtaaccagagagaacatggagagagagctcttttaatttccaaagagctatgagagttgatgagctgggaggagaaagagatgagctgcaataataggagacacaaagaagcatgacttgatgacgctcatacagtacctttctttgctgtgctggcagcaatcaaggaattttatgaacctttagagacttgtaagatccttgctactggtttatcaggatctttctgattatcatttatgatttattcccattttctcattcctgttatttcagttcatttttccgctatctgcattgcttttggaggacgcaaattcccctcacataattgccaagtccatgtacagtttccatgcatgattctatatggaagtagttgatgaaaaagagttggttagcatgctaatcagtgtattagaaggaaagactcaagaaaatccatttgcatttctggttttgtgaattttacttcattacaatgagagaggagggtgacgggatgggccactttctctctcttcaattctaatgaagcagctggaaagatttaaaaaatcattctgcatagtcaaagtcaattaaaagaagaacactagcaacctgcaattatttatatttttttaaaaagatgcttgatatttaattggctaaataaagtctgcctatatatcagtaacattttaactaagaatcccactgcagacatttagccaaagtagctaacatgtttgatattccagctttgaagggttggttggttaagcctaaggatatactttctgtcccctccaacaatgaccaagtggaagatcttaagaatgggtctagtttcttcctggtttagtcttgggagggtgtatgtgtcaaggaacaggctctgaaattgtggcaataatcaatagcttaccaaccaaaaagagtccaggaccagatggattcacagccgaattctaccagaggtacaaggaggaactggtaccattccttctgaaactattccaatcaatagaaaaagagggaatcctccctaactcattttatgaggccagcatcatcctgataccaaagccgggcagagacacaaccaaaaaagagaattttagaccaatatccttgatgaacattgatgcaaaaatcctcaataaaatactggcaaaccgaatccagcagcatatcaaaaagcttatccaccatgatcaagtgggcttcatccctgggatgcaaggctggttcaatatacgcaaatcaataaatgtaatccagcatataaacagaaccaaagacaaaaaccacatgattatctcaatagatgcagaaaaggcctttgacaaaattcaacaacccttcatgctaaaagctctcaataaattaggtattgatgggatgcatctcaaaataataagagctatgtatgacaaacccacagccaatatcatactgaatgggcaaaaactggaagcattccctttgaaaactggcacaagacagggatgccctctctcatcactcctattcaacatagtgttggaagttctggccagggcaattaggcaggagaaggaaataaacggtattcaattaggaaaagaggaagtcaaattgtccctgtttacagatgacatgattgtatatctagaaaaccccattgtctcagcccaaaatctccttaagctgataagcaacttcagcaaagtctcaggatacaaaatcaatgtacaaaaatcacaagcattcttatacaccaataacagacaaacagagagccaaatcatgagtgaactcccattcacaattgcttcaaagcgaataaaatacctaggaatccaacttacaagggatgtgaaggacctcttcaaggagaactacaaaccactgctcaatgaaataaaagaggatacaaacaaatggaagaacattccatgctcatgggtaggaagaatcaatatcatgaaaatggccatactgcccaaggtaatttatagattcaatgccatccccatcaagctaccaatgactttcttcacagaattggaaaaaactactttcaagttcatatggaaccaaaaaagagcccgcatcgtgaagtcaatcctaagccaaaagaacaaagctgaaggcatcacgctacctgacttcaaactatactacaaggctacagtaaccaaaacagcatggtactggtaccaaaacaaagatatagatgaatggaacagaacagagccctcagaaataacgccgcatatctacaactatctgatctttgacaaacctgagaaaaacaagcaatggggaaaggattccctatttaataaatggtgctgggaaaactggctagccatatgtagaaagctgaaactggatcccttccttacaccttatacaaaaattaattcaagatggattaaagacttaaacgttagacctaaaaccataaaaaccctagaagaaaacctaggcaataccattcaggacataggcatgggcaaggacttcatgtctaaaacaccaaaagcaatggcaacaaaagccaaaattgacaaatgggatctaattaaactaaagagcttctgcacagcaaaagaaactaccatcagagtgaacaggcaacctacacaatgggagaaaattttcgcaacctactcatctgacaaagagctaatatccagaatctacaatgaactccaacaaatttacaagaaaaaaacaaacaaccccatcaaaaagtgggcaaaggacatgaacagacacttctcaaaagaagacatttatgcagccaaaaaacacatgaaaaaatgctcaccatcactggccatcagagaaatgcaaatcaaaaccacaatcagataccatctcacaccagttaaaacagcaatcattaaaaagtcaggaaacaacaggtgctggagaggatgtggagaaattggaacacttttacactgttggtgggactgtaaactagttcaaccattgtggaagtcagtgtggcgagtcctcagggatctagaactagaaataccatttgacccagccatcccattactgggtatatacccaaaggattataaatcatgctgctataaagacacgtgcacacatatgtttactgcggcactattcacaatagcaaagacttggaaccaacccaaatgtcctacaatgatagactggattaagaaaatgtggcacatacacaccatggaatactacgcagccataaaaaatgatgagttcatgtcctttgtagagacatgggtgaaactggaaatcatcattctcagtaaaatatcacaagaacaaaaaaccaaacaccgcatattctcactcataggtgggaactgaacaatgagaacacacggacgcaggaaggggaacatcacactctggggtctgttgtggggtggggggaaggaggagggatagctttaggagatatacctaatgctaaatgacgagttaatgggtgcagcacaccagcctgtcacatgtatacatatgtaactaacctgcgcattgtgcacatgtaccctaaaacttaaagtataataataataacataaatttttttaaaaaaatgggtctagtttcttaagcaaccctggaaaatagaaaagaaaaatctcccatattcagggtgcttttgtataacagctgagctggttcaagtgtcccagagagaatgggactgaacactgttcatgctcattatcgtttatctaaaaactaaagttattggttacagagcgttgtttagatactatggcaataaatcatttttgtgagctgctgtgatgaaacatatattgtccttcaatataagcaatcaacagcaacggtgtttcttgttctacttcaaactgttggtccctggaaaatctacagaacaaaatctcttaatgtcacagtatattatgtgtttcagaaactctacatgaaatcattcatgtacattcattctacgtgaattctacattcattctacatgaatgaataaaatggcaatcagtaaatggaagagataaatagacaatgaagaaacaaaattggctaattcacaagccaggtaatctctgaggaataccagagtatgccaccctaaaatatgcctctttggattatggattattttgagctaaaagccattaaaaaccagcagcaggaaaagctctaaaaataaagcacagattttccttttactggggaagtctccatttatagaggtgtctccctcataccaggaagaggaggactcttaacaactcttaactcttatcaatggagaaagcaccaatttaaatctgcaaacaaatcttaataaacaacccttgtttgccattcttttctcttgtcaccttcccataacttgcctccttccacccacaacatgaaaccctttttctttagtctaagatggtatataatcctaaattctaaccacccccgtaggtcactcatctctgggtactcgcgtgtgtaagcacaacacatgtgttaatgatataggagttaaaaagaaattatttaggcagatagtgaggctaaggaaggttttccttttaataaaaagcagcccccaaatcattttcttttctaacaaagagcagcctgtaaaatcaagctgcagacatacatatgcaagctggaagcttgcatgggtgaatgttagcagttgtgtcagtaggaaaaggctacctatgactaggcataatcaaaatggcggctccatcttcccttcactttgccagccacatgtacagtaagaagcagacaagatgacgctggccaagtggaaagtccatttgcataataagattagggtggtgcaaccagccttccctggccccacccctcgctatgtaaacgtcacacctggtagaaccaatctgtggccctatgtaaatcagacactgcctcctcatgcctgcctataaaatctgctgtgatctgctgcaggctggcttttccctttcagacacctcacttcagatagctgctgtcctctcttctttcttctgcctattaaactttttgctccttaacccacccacatgtgtccatgttcttaatcttcttagtgcaaaatgatgaaccccgggtatttaccccagacaaggatgccacttcactaataaactattgtttgtttttctcttgttaatctgtttttggacagtctaatttatagagccccagctgaagaatctaagatggatagagaaaacgattttttcctcacctacatctgtaattatattagtttgagggtaaatatgaagcaataatgatcactacttggtaatctcctttaccaatcctctgtaatttggtaaattataaagcaaagttatagccaattctcatgattcaggcttctttttatagcattatgtctaatatatctgattcatgtctattgttttagtaataacatgccaacctcatggaaaccaaaaagtatctcagacagctctcaatcaatttagaaagcttattttgccaaggttaaggatgcacgcctgaaaggcaggtctgtgcctttctccaaagatggttttgagggcttcaatgtttaaaggtgaaagagtgggtatttgggaaagagaaagaaattttcaaaaggtgtgggtagacaaatggttgcattcttttgaatctttgatcagcctttcactgaatacacaatttacatgtcggtggtgtggaggaatagacacttatgctgtcatctggctcactgaatcagcatttttacatcagaggaaacaatcagatatgtgtttgtctcaagtgatcagagggatgacttagagttctgtcctttgtcctgcacctgtaaagataagctgtctatttcactgtcagagtaaaattcaacagaactgtcatagggtgaagatcttgaagtccacaaggaatttcctagtgggcaaattgtgagggaggtatatactttgtatttttgtagctatcttatttaggaataaaatgggaggtaggtttgcctgatgtgattcccagcttgacttttctgtttggcttagtgatttgggggtcccgtattttcctttcacactcacagtaaaattttaataccctcaaaatctgcaggacaaaactcacacataaagctccttgagaagttactagaggttaaatgggtccgaagggctctttccattctaggagaaggatcatgatactatgataaggtcactaatatcagcatcatttatttatttaacaaataatattgagtacctgtggtggatttatatcatgtcaacttagctaaggtgtaaccacagttttcagacttcccttcactgcataattccaagttagtatgggccacaaatgacatttgcaaaaactgagaagtagaagtgaaacagcagccttaaaaaataaaactaatagttggaagatttgctcaggtccactaggcaccactgcaactcatgtacgttgcgcccatctgctggcttgccttgaagatgtaggagccaaagggaaatgacctatttgcactttgaagtttcactgaaaatcaactgacaaaggcaaaacaatagcagagaaggcttgcacaattttattttaacatgcatagcacaggtgattctcaggagaatgattacccaataacccaatgaggtacagaagcttatatcctttttcacaggggagaggggagaatggggaatgtggacaatgcttctcagagacagcaaatgattcttaaggagaagaaatggacagaaattaacttgtaaatgattgtctttggaattcgaatgagccagaaaagcaggcattctcttgtgaaaaatccattctagttgcattcctcagtcttcttttctgaaagagacagggggacttcagggagaggaagaaggcaatcttgttcattttggaaataagatttcatggtgaaataagaaaatcccagaaaatcccagagaatcccttcttgtgcttgggcacgaagcggggttgggggaagaagacaatattagagggacctggattctgaggcagcttctaaggcctctcagcatgtcaaagtgccaatctttgcagttttattttccaagccccaataatagcatagggcagatcccactcctagtttttctgctcctatcggacaccccgtcaactctctgacaagcttcttcaactccctgttcaggtgaatatttagttccatgacaaagggctcaaactttgattgaaggtcaccccttcagcattgaaactggaggtttggaaagactgacagagttctaactcatccattggagttccagctcattctcgtgggttccaatttctccttgctcttcaccactttgcctttgtcttttcttcacaggtggctgccttcctgattcagacttcagaatcaggcacaaagacaatagactctgttagaccatttaagcaacttccaaaattacataaggccagttggaattttttcttataaaaggcaaaccaaaaccaaaaccacatttttctctctactctcactcttaacacagaatgcctctgtgaccaaacgcgtgggttttttttcccctcaacacatcaagcaattctttagcagacaccagttgggtgtcctataactcaaatcaattctgacactgtgtgatcccacaggttaagagtcagatcccacaggttaagagctcaatcccacaaaactgccgccctaccttaagatgccaattgcaaggcccaggttgtgacctgtaatcctgatcaatggctatagcaactgggattcccacagtctgcctccttgtgttccataatttgctaagacagctcacagaactgagtgaaagactttacttacatttactggtttgttttaaaggatatacaggatatggatgaacagctagatttaagagatggctacaagtctggggtaggggatgtcacagttttcatctttctctcggtttgccaccctctcagcacctccacatgttcaataaccaggaagctcattaaatctcgtcgttcaagagtttttataggctataatctccagcaccttccatcaggtcaatgggtggggttgaaagttccaaccctttaattctttaatcccttggtctttctgataactggcagcatcttgaggctatccaggggctctatcctaaattgagatattaggataaatacaggtgtgatcaaagggggtccatgaataacaaaagacactctaattacccaggaaattccaatggttttaggaactaggtgacagtaactgggtacacagatcaaatgtatttcattcttaagggctctgttttgtcatactgaaccttgactcatacaatgcccaccatgtacctagcactgatcgtatggatataaaataaaaattaattttatattctgatcatacagatataaaaattaagccaatctagtgaagaagtctgtgttagtttgttagggctgccataataaaatatcacaaactgggtggcttaaacaacagaaatttattttctcactgctctggaggctggaagtccaagctcgcggtatcaacatgtttagcttctcctgaggcctctttccttggcttgcagatgcttgtattctttccgcgccctcacacagccttttctctgtgtgcgttcctggtgtcttttcctctttttataaggacactagtcctattgcattagggactcacgttttctacagcagatacacgtgtcggcaataacttaagcatatgctgagaatgaccctgtagtctaagaagaatgtgtgttcagagttctgaaaccctggcctttcccttagaacacaggctgtccagcggattgaggccctttgttttgggttaaatagtgattgctagatggatggtactgtgtgaaaatactgtatgaactgcatgctttttacaaatggtagcacttctcctgttcagctcgctgccactggactgtccctgaaagcaagttcccccaaagaaccctgtgtcttattccttgtctccaggtctcttcttcagcctctcagacacagtgccatccctattggagtaaataggggttcaggatgacacctttatgacctcgtttaatctttattacctctttaaggaacctatttccaatatagtcacatctgagggttagggcttcaacatatgagtttgagccggacacaattctttccatgacaaaggcaagtaaataggaaagtataattgcacctgaaatatgctagatgcaattataaaatgtcatggaaatccatacaaaagaaatataacacagttctggaaatgtaaattcagagatagagtgattatataatgtattattcaaatagggacacttgtaagagtgaaaaggtgtattaaaaagaatttaaaggcactaattatttttaagcaggcataatctagaactttcccaggaaaagtaggagacatatgcaccctattcaaagaagacctaatggaagaaataccatctaaactgagacctaaaggaggaagggaagttgagacaaaggtgagaaagaagggagtgtactccaggtgagcaggcagaaagaacatagtcagcagaaaacaataagctggagaaacagtgtgccatgtttggaaaactgcaagagatttcacatggctgaaattatgggggcagaaggtgtcaggcaagaagcaaggctaagcaagatttagaggataacagaattccttaaagagtttggacttggtctgtagcaggtgtgggccattagagtttcagtcatggaagcagcattgtttaattcacattttttaaagatctctcagattcgatcaagacagcagactccgtcaattcctgactcttaccaaatacctcttttcccccagggacaaagagcatcatccaaaaggccaaataaataacagccatgggaaacaataaggaattcagaaatggaagatttgcataaaaacagaaattaaacagtatcagatagacaaagaagccacaggccagtgtatgaacaagagagaaaaagaggtaagagagaaccttttacctcttttcataagggtgtcccaaccttatgtggaagagatacaggacaaacatcagtgcagaacactgaggaactctatttagagcagctgagcaggtcggcctctactcctaatctcctcactcccagatctgaggggactaaagagtcagcttccaagggctctcgttaaagatgggcaatttgagtgtcaataatgataactacaatagattgaagtgcatcacataagcttccgtctataatgatactttgataacacaaattagctgccaccaaaggataccaataaattgttttaaaactgttaaataaagggaaagattcaagcatttatcttgctttttctatatgaactgtaccaaagggtaaacaatactagatgggatgtttctctttatagaaatacttcagctaataaatgaggaaggaataatttaattagtacataaccattttacaactataaatgaggtaacggagtaggtattgataagcaatagctgctaaaaccatgaaagtaaacccaatggacattatgtgcctctgaataggagaacataatattacctacgaattaattttgctaaaagaaaaagttaaacctgaatctaattaaacatctaatcaaaccttcagaccaattactaatgtgcaggaaatttagaatgatagaggttacagtcagaaaatcaacaagacaaatgacctatttttcttaacaaacaaattacaaaaataaaaaagaaatggagaaagactacagattagaagagtaatcagagacatgcctatcaatcacaatgtgtggaccttatttataccttgatttaaaaaaatcaactgtacaccaaaattgcgatatttatgtcacagttgcacacctagatactgactcaatatatgatgactgaatagtttgagtttggaataaatgaggagacgaggcagttgcatacataaatccaaagctcttgacagacatctgaactggggaaacatatgtagaagtcggaatcaactatgaattcttgctgaacacacatgagctgatgagctacaaagctgtgtttgaagctggggttatcaacttctgcactactgaggtttggggccagccaattctgcgttgtgtattataaaatgtttaggtatatccatagcctccacccaactagatgccagtagcattcccacacgcagtagtcacaaccaaaaatgtctacagatattacccaatgtcccctgggggatagtgggggcaaaagtgaccccagttaagaaccagtggtatggagtaaaaagagaagagggcagagaatgaagcctcaaggagtcatacaactccatcattcacttacaattccatgactaactgtgaccatctttccagaccccagtattcttatctacaaaatggacatgatataatctaattcacgaaataggtgtggcaattatttaatattgaaaacacttcttaaagtgagagcatattcaaagtgcctgcctttgtaagtgtccattactgtgggcctcttatctcttcccttctcccttaaagctgttagtccagtttagctccacgaaactccagaacaacatttatcctcttatcagtctcttaggaaacctggatctttgactttgtagctacaatgcggaagcaatcctgattctgtgaagctgcttaaggattgccaagtttcacccacttcctaaccctccacaggaaggtactttgcataagtaaactagcaagcaatctcaaaagtaaagacaagatgttgttcttcctggaattcagtatcagagcccactcttacaccttcccgagagctttctcaatatgattaagaaacacgtcctcactggaactccttggatgaaaaagtagacaaaaatgtatattctcagtgaattgaaaagattttgccaggagaaagttaccctgctgtaaaagaggttccctttcttacttaggttttgagaaaggggcctgaagtttgtgctttacctctgtttacccaacatgatttcctttcagcagttataactcccttattaagagctttactgagatataattcttacacaatacaattcaatcatttaaagtgtgcaatgcaaggattcatggtatattcacaattgtgtacaccgttactgtagctaattttagaatattttcatcaccgtaaaagaaaacctgtttagccatcattttcctacctctttatcccccaatccaaagtaaccacagatccactttctgtgcctatagatttgcctattctggatatttcttataaatggaatcataatatgtggtcttttgtgtctgacttctttcacttatgaaaatatgaaaagcataaagtcttcaaggctcttctttgttgtagtatgtaaccgaatttcattcccttctatggtcaaataatattccattatatggatatatcacattttgtttatcttcagccaacaactagtaagaaaatgaggatctcagtcatacaagttcaagaaaatgaattctgccaataacctaagagagccgggaaacagatttccctagctgagcctccagatgaaaatgcagccagcggacaccttgattgcatccatgagacactgagcagagaacccaactaaagcatgccagatttctgataataaattaatattattgcaagccactatattagtggttattttctatccagcaaagaaaactaatacaactaatacagtggcaaatgtcattgtgtgtgtgtgtgtgtgtgtgtgtgtgtgtgtgtgtgtgcatgtgtgcatgcgtagctttgtgtgcatgcataatttgtgcactaagagaatttagtggctttgaagcacgggcaggacctaacacatattcttgctgttgttctatatgccttttgtatacctatcattgacttatgttttatatctaaatagctcttttactacacatctttcatacacatcttctataattaaataaattgttaagattctcatcttgatgataatgcagtaacctgcacaagagatttgcttgttgatttgttttgtcctgagaggtagagttctaaacccttaaaccttgcaaatgcttttctgttttgagtcccaaattgcacttttaaacagaatgagaggtagaagaaatcagagattagatacaaagagacttaaagttcctaggggagtggtaaacctaaaagaaaacctgcagtttgtctgtgtaacccacagactatttaaatgtgggtgttattgtttagttagcacagtattatgtaagggcctaaaacaattttattctggtgatttcagagtacagtgtggtatatatctgtgtcatcagattgcagtcagaataaaatacaatgcaagataaactccaatcatttttttcattgtggtgttagccccaaagctcccccattttacccaaagacaaatggacaacaaatggtgttctgttattggtacagaactcaaactgaatgggatttatcaggattttgtgtctaatctctcttcttaagggctctggctgttagctttgacgaagagaatggaaaccagatgtttagataccagaggcagagttcctaggttaaaaacaaagtttaaaaatgccttttatttttatgtattttcatatgtcattctaagtatgaacatttctcactgatattagtggatttgaattatggattaaatagccaaccactccccaaataaaaccaaactgtgttaactacatctttagcaataagtatatctgtccttgttattacagaaaataaagccagtactgaaatttctaaataatactaataaaaaacatattcaagaagtagaacacttttatttaaaaattccagtaaaatgcattccctccttgcatggaatttttctgctcatgaaaacactttcaaagcctccagctgttcctgattattttcccccatcagctccacactatcatcttaaaaaggcacaataggactttcccaaataatcacaatgcatgatgaaactacttctacagatctaagaactccagcaaagaatttgtaggggattactatctcattttccaaaagtgtcttattcagatgtagctacaaccaccctacagttagagcaataatttttttcttgtcacacttcagggggtctccagttatgttaacaactgtcatgaaactctaaaagaaaaaaaaaattaatgtatacttgctctcataaacaaaagactaaaatgtattctattatccttaggagtagaaaggagaaagagttcctgaaatcaaaaattgaataataagatcataattgcaaagagttggccagtctagattagggaagtgactcaatgttctacttcattttctgctgctataacagaataccacagattgggtaatttacaaagaactaaagtttatttggcttatggttctggaggctaggaagtccaagagcatggcactagaatctggtgagggacatcccatggcagaaggcatcacatagagtgtgaatctgcaagacagagacaaacagagcaaaatggattctattatcaggagctcactcccgaggcaacaacattaatctattcatgacggcagagtactcactgacctaatcacctcttaaagaccccacctcttaatactgttacgatgacagttaacttttttacacatgaacttcttggggacacatttacatcatagcactctcaaacctagctgatcataaaaattgcttggaaacaggtttaaaactcatattttaaggacccttaacatgccttctaaattggaactcttgagagtcaccattcataaagcagtttccacgtatttcagatgcagctcatctgtcaccagagtttggaaaccacaaaattgaggggtgtttaaatattcccaatggtttgttaaagtgttaattatcatgtaatacctgataataatctactcaaacatttaaaacacagactttggtctgaatacttgcatataacttctgactccccaaaatccccaatggaatgaccaaaggaattcaaaaattgtgggaaaattgtatcagctctgaaaatcatagaaggagaccaaactattatgaaaaagtaaagcaattcctgcagaatatattgtaagcaagaaaattgagagaactgctgaccaagtcacaattcccacactgactccaagttgatagcagcagggcattaggacaaagtaggaggtactggagggaagttacaaatctggagctgacaaggatgggattactctgcataatttttccccagtttactattgaatcatacagcaagccaagtagaataggggcaatgctacaactagtctcaaaagagaaaggctgtgacagtcagagaacaggcacattattccagcaataaaagtgaatttaatctctttggcttaagaataagacttcttgatgttgctgtccacacccccacccagccttaatttatatcctattcttcagaggtcatcaccttataatttttcaatgtaaaactacaatagcgttaactcttccttccttttcctttttaatttccttcattttttttcttccttccttccttttttactttctttcttcccctgtttttttattccttctcttccctcctctttattcctgctttattttttattttgtcccaaactgtatctgtttaaaagaagtcacataaatctccaaatatggacaaacctagaatgtcctccaacattctatttacctagtcactccttcattccctatcccatccatgtgttatttgcaagaagcaaagagaaaattctaaagagagtcaatagttagaaggcagtcaatctgagaaggcagacaaaatatttcctaagaatggttttattaataaaagctaggaaaaactatagaaaatatccaatgtgtactttcaagaagattcaagagaacattttgtgtatgaagtaaaagcaagaagtcattaaaaaggtaggacctgagagcagaaaaagttgctttgagatgaaaaatatgaccatgaaatttctaatgtaatggaatttgtgaatacaagaggagattctgtagaattggaatcaatggattagaaaaataagctaaataacttcttccagaacttctaaaaatgtaaaaacaatgctgccaaagaagtaaaaatttagaggaaatatccaggagatctaaaataagttttataagaagtctagaaggacacaggaacagaaaaccgaataccacatgctttcatgtgtaagtggaagctgactgaggggaacacatgggcacatgagagggaacaacacacactgggtacctattgggggtgtggggcagagagcatcaggaagaatagctaatggatgctgggcttaatttctaggtgatgggatgatctgtgcagtaaaccaccatggcacacatttacctatgtaacaaacctgcacatcctgcacatgtacccctggacttaaaataaaagttgaaaaagatagatgtctagaaagaaagaacttggcagatagagcagcaaaaattaaaaaaaaaaaaaaaaaggaagaagcaatagaaaacttagcagagctgaagaaagtcatttgactagaagtgtagaggacatgtttaatgtcaggtaaaattaattaaagcagagttaagcctgatatattttgatgaaatatttcatttcagcactaaaaacagaaccctacaagcatcaacacaggggtgccagcagggaagggcgaggacaagtgacttacaaaagaaatcctcaaattggcaccaagtttttcacaatactaaatgccaaaggatcatggagagttgccttcagagtctaagaaaatcaatttaagaaccaggaattccatacctaattgagctgacatatatacaaaagacaagaaaagacacacgcccgtaatcccagcactttgggaggccgaggcgggcggatcatctaaggtcgggagttcgagaccagcctgaccaacatggtgaaaccccatctctactaaaaatacaaaaattagctgggcgtggtggcacaagcctgtaatcccagctactctggaggctgaggcaggagaatcgctagaacccgggaggcagaggttgcggtgagccgagatcgtgccattgcactccagcctgggcaacaagagtgagactccatctcaaaaaaaaaaaaaaaaaagaaaagaaaagaaaagaaagacaaaacataatcactatgttcccttccaaaacattacaaaaagaagggaacagctgaaagagacaaaggcagtaacgaaaatctaagaagggggaagacagtagtataataacacgtagtgtttacccagtggttactatgggcaaagcactgttccaaatacttcagtaacccactcaaacctcacaataaccctatgaaatagactctgttgctatacccagtgcagaggacaatacagttttagagaaatcaaggaacttgttcacagttatagggctagcaaaatggtgcagccaggagttaagtccagagagtctgagcaccacatctgagtgcttaaccactaggctacgcagctcctcgaaaggaaaatgaaaggagagcaaaaatagaaaacgtaaaggaggaagctccaaaataattattaaaaatgaatcaataacaaaagtattgaaatacatacctcttatgaaaacaaatgactctccaagccttaaaaaagaagaaaatcctgccttttgcaacaacctggatgagcctggaggacattacgctaagtgaaataagccaggcacagaaagacaaatattgcatgatctcacacatgtggagtccaaaaaagtcaaacctagagaaacagagagtggaagggtagttaccaggacctgggagatggggagaaaggaaagatgtttgttaaagggtataatttttcaattataacattaataacttttgaaaatctaatgtagattatggtgactatggttcataataatgtattattagcttgaaatttgccaagagagtagattttaagtgttcccacccccaagaaaggtaactatgtgagctgatatgttaattaacttaattttgagaatcatttcacaatgtatatgtatatcaaatcatcacattatacactttaagtatatgcaatttttatttgtaaatcgtacctcaataaagctggaaaaaattcttaaaaaaaaagaaatatatgactcttcggaagtgtaaagaacttaaatcacagaaaggttagaaataaagagacgagtaaatatacgccagggaaatgcaaatttaaaaatacatgtgtcaatctcagaaaaggtaaaattcaaattaaacataaacaggacagagagaactattttctgttcataaaaaggaaaatccagaatgaatttgtaaaagataaaaactttgtatgtgctatgtaccatggcacttcaaaaaaacagcaaaatccaatgaaacaataaaaattacattgtagtcgtggcaaaaagcatttaatgttttctcagtctttggctaatcaagacaaaagttcagtatataaaataattgactattacaaatcgtcccttggtatccaaatgggatgagtttcaggaccatctgggatactaaaattcatgcatgctcaagttccttatataaaatggtgcagtatttgtatgtaacctacgcatatcctcccacattctttaaatcatctctatattacttacaatacctaatacaatgtaaatgctatgtaaattgttattatgctatattttcttatgaattattttttatttttttttaattttcatctgaagttgattgactccaaggctgcaaaatccatgaatacagaggtctaattgtatatttagtatgttaattttatggatatgaaagtaataatataacaatatagagatacatgtaaaagagggtcgtgattaaggacattggctgcagagctgtataacctgaatttcaaacttatttcccccacttaactagctcagtccttagacaatacacttaccatcttgctacctcagtttccttctatcctcccttataaaatggatggtatcattgttatgataattaaagtctatacatatagtacaaaaattagtgtccagcccataataaataattactatgagctgctataataactaatgatgtatatatatatatatatatatatatatatggaattttgagttttacgaatagagaatattctttctttccaaatattttagggatattttacaaaaaacagtaatataatatgccacaggaaagcacaataaattatttaatgtggaaattacatggaccacatatctaagtatactaaaactctaataataatagtaaacaaaaaatcatcctacaaagaaattttaaaacaccctcctaagaaatttttgggtaacaaaagaaatcaaaactgtactttaacttatccagataattctagattgtattctagattctagaatataaccaattaagtgtctatatatcaaacctaggtgattatagtaatacaataaaagttttaccatacaacaatggagatgtcatctttgtaactttagaacaagaatttttaaacaagaaataagacacacctcttcaaagaaaaaagtgatgcactggacaatgtttaaattataaaactatgttaatcaaggacaccattgagagagtgaaaaaacagctaccatagaagaagatactcataatgtacatgtgtaacgaagacttcagatccagaaaaaagaacacttaaaaatcagtaggagaaaacaaaagaaaaatagacaagaaacttgaacagttacttcacaaaagaagtatctaaatggccaataaactatgaaaaaatactaacttttcatgtcatcagaaaaatgcaaattaaaaccacagtgtgagaccattgcccacccaccagaacggctaaaatttaaaagaacaatcaatactaaattttgtcaaggatatggagtaaccaagtatcccatacattgttagtagaaatgaaattagtacaaccaacttggaaaactgttcagagtatctattaatgttgaaaatacatattccaagtatatccccaccaagacatgcatccatatgttcaccaaaagacgtctactagaaagttcatagcagcaatatttataatactctgtagttagaaatgacccatcaacagtagaatggatgaacaaatggtgatgtattcacagaataaaataatatatagctataagaatgaatacattataattatacataacaatatggcggaagctcacaaataatattgagccaaagaagccagatgcaaagactacaaactatgatttcatttatacaaagagcaaaggaggcagaattaatctatgctattaaaagttaaggtattagttacctttgggaggattgtgactagaaagaagggctctgggaagccagtatattctatttcttgatctaggtacagattacacaggtttattcagttggtgatgtttgtatgagtgtgttcagtttgtaaaaattcattgagctttttgactatggtgtacacacttttctctttttatattaactatctttcaataaaatgttttaaaaatttatgggaacagatttaaaagtatactaacaggaaaatacagagcactttgtgcttaacaaaagaatatcactcaagaaggtataaaaagtaatacaaaatgaactaagtttctaaatgtagaagcaggaaagggaaattaatagagcttaagaaccacatttaaattaatgataaaatattaaaatgcaaaactgataaataaatccaagcaccagctctttgaaaagaccataggcaaacctcaggaaatgtaaaatgaaaaaaaaaataaaaagaggtaaaacctaagtttgaaaaatgatgaaggggatgggatattatcatagatcagaaattctcaactttagcaacactgacatttggggccagataattctttgttataaggggctagcctgtgcattgtaacagtagccctggcttctaccaactagatggcagtagcacattcccacttccatctgcaaaatctgaaaatatctccatacattaacaaatgtcaggaaaggcaaaatcacctccagctgagaagtagtgcaatggtaaaggaagtaaaaccctatactattaactttttacatctgaataaaaaagcaatgtttgaggaaatatacattataaaaaatggtggaaatgtggtagagaagctcaataaaacagtaatcaaaaaattaaaatttgtattaaagattcattacccaaaaaaggcaaattctgaattttctatgttgttacgttgatttgtgtgtatattcatgccctggtgccacacccatttaatcattgtggcagagaatacccttcagacttctaaggactagatcattcatctcctacttagaatgttattgagagaagttatacaatagaaatataaatgaataccccatataagtaatagaaattgaagaaatttgatttaataatagataaataattataatgatatattaattgtaatgataagattttataaaagttgatgtatcaaaaatattattccaatgtacattcaatacaaaagtataatatttgaattcttttttcatactaagtatttgaaatttggtatgtatgatatacttacagaacatctccattcagactagctatattccagtgctcagtagctatctgtgtattggacagcacatttacagagtatagttaaagatggaaatttcctggattcatttttctcatttcctgaagacagtagaaacgtgatctttaaaaagaataaaaaaaacaaagacaattggcacttcagaacttagaaacaaaatcttcaaacaaaatgttagcaaaacaattatcattaccttaaaatgataatatgtcattcatgatcaagtatggttactctaagaatgcaaggtgcaatttatattggacctattaatattatttatcctctactatataagagagaaaatcatatgagcagtttaatgccagaaatgtattcagttaattaaatttcatttatattcctgattttatcttttttttttttttttttctgagacagagtcttgctttgtcacccaggctggagtccagtggtgtgatctcagctcgcaacaccctccacttcctgggttcaagtgattctcatgcctcagcctcccgagtaactaggactacaggtgcatgccaccatacctggctaatctttatatttttagtagagatcatgtaggccaggctggtctccaactcgtgacctcaagtgatccacccgacttagcctcccaaagtgagattacaggtgtgagccaccgtgccaggtcatccccccatgccctgcttcttatatgttgtacaccatatattagaattcaaaagctgatatcaaaggtaaaagtaaaatgtcttatttttaataaaactgagaatgatctaagaataagaataccctaattcttaaagattcactacttaaaagtcagctctctccaaattaatttataaatattttataagtccgattagtgtcaaaattattaaaaatattacctgtaagaaataaattataaaatggccaacagatttttggaaaaaaggtgtgctttgacttactagatattaaaataaataagaaaaaagtaattaaaatagagaagaacaagtgtaggaagtataggcagttcaatcatgcaatgtaaggtccagaaagaactcagatatttatagaaatgtaatatacagaaatagttacttttcaattccagtaaagatagattcttcaatacatgttcaagagtttagctacagtgaatgcttattggagtactattcattggtgaaaaataggaatcaactaaaatgtttgtgacggttaatactgagtgtcaacttgattggactgaaggatgcaaaacattgatactgagtgtgtctgtaagggtgttgccaaaggagattaacatttgagtcagtgggctgggaaaggcagatccacccttaatctgggtgggaaccatctaatcagctgcaagcacagccataatataaagcaggcagaaaaccatgaaaaggttagactggcctaacctcccagcctacatctttctcccgtgctggatatttcctgccctcaaacatcagcctccaagttcttcagctttgggactctgactggctcttcttgctccctaacttgtagacggcctattgtgggaccttgtgattgtgtgagttaatactccttaataaactcctttttgtatatatatcctattagttctgttcctctagagaaccctaactaatacagattttggaaccaggagtggttctagaggaacagaatattaaggatggagttctttcattggttttggggtttctggaattgtctgcttaatatgattagagcctaaaatgctaaagtctctgcttccaatagtatggagaaaactgatagttcttggcatgaactgtttagagagttatgcaagataaatgcatttgacactcctgattcaccgctcatgagatgcaagtttagtgactctatacataatacctttgaccatatgtagagaaccaaagaacataatgaagttggttggttgctcctaagttcactggacaaagtgatgagagaaaatgatgaactcaaggattctaactccaggctacagaagcagatacttagcttcaaatctactaagattgccctgagtgagaaagagctgtagagaaagagctgaaattgtggaaaaacagacacaaactcttatcatgcgaggggctggcatgcaatgaaagatgcatgcacagcctcaccaggtgtctactgttaaagtgagggcattgactggaaaagaatgggaccttgcaacttgaaatggggatgtatgggaggaccctgatgaagctggggacactgagtttgtaaactctgatgaaacttttttaccagaaggaatagcttccccatccccagtagtggcaacatcccctctctaacccatgctgccatcagcctttccacctgtgtctgaggggataaagcttgtactgtctgaggcaacagtggtggaccgcttgagccagttgccaggcaggataatgttgattctcctctggaaccacccccaaaacccctgtttgcttctagaactataactagactaaagtctgggcaggcccttagaggtgaggttcagagtgtgacccatgaggaggtgtgggacacttgaaaagaactgcttgagttttccaatgtacacaagcagaaatctggagaacaggcatgagaatggatattaaagttgtagaataatggtggaaggaacacagagttggatcaggctaaatttattgatttgggcccactaggtagggattctgcatttaatgttgaagctcagggagttgaaaaagattctaataatttatttgcttggttagccgaaatacggattccaagatggctcactctgagtgagctggaattgcctcatctgccttggtttaatgtagacgaagggatccaaaggcttagggagattgggatggtggagtagataagtcactttagatccactcatcccagctggtagggtacagaagatatacccttgaccaacgctttgggaaacaaatttgtgagggaagcacctgcctcttagaagagccctgtaattgctcttctctgtatgtcagatctaaaagtggaaaccacagtcattcaacttcaatatttaaatacaatgggtataattggatcccgagctgctaagggccaagtggcagcactcaaacaacaaaggcaaggtgggctactgtaatgggtggcagaggcaaggcagcaatcagaatagtctgacttgtgtagacctctggcattggttaattaatcaaggtgttcctagaagtgaaatcgatgggaagcctactgtattcctacttaatttatataagcagaaaacttctagatcaaatggacaaagactaatgtgaattataaaaccagaaaatcatggcccctcaatcaatttccacacttgagccaatttacagacccagaaacccttgaatgaagaggaagccaggtctccttgaggaaggaccccactacactactgacaatttatgctgttaatctttctcccattcttccccaaagggtcctctagtcttttaccactggggaaagggaaatgatcagacattctgaggactgctgggcactggctctgaggggatgttgatttcaggggactgaaaaggtcattgtggtcctccagttaaagtagtggcttatggaggtcaggtaattaatggggttttagctcaggtctgatttacactgggtccccggactcatcctgtggtcatttccccagtgccagaatgcagaattggcatagacacacttagcagctgccaaaacccccacattggctccctgactggtaagatgaggggtattaagtgggaaaggccaaatggaagccattagagctccctcaacctagaaaaatggtaaatcaaaaacgatatcacatccctggagggactgcagagattagtggcaccatcaagaagttgaaaaatgcaggggtggtgattcccactacatccccactcaactctcccatttggcctgtgcagaagacagatggatcttggagaatgaccatggattatcataagcttaaccaagtggtgactccaattgcagttgctgtaccatatgtggttgcattgcttgagcaaattaacacattttcttgtacctggtatgcagccatcgacttggcaaatacctttttctccttttctgttcataaggcccaaagaagtaatttgccttcagcaggcaaggccagcaatatacctttactgtccacccttagtggtatatcaactctctggctttgtgtcattacctgatttggagagattttgatcactttttgcttctacaagatatcacactggtccattacattgatgacattatgctgattggatccattgagcaaaaggtagcaaacacactggacttactggcaagacatttgtgtgccagaaaatgggaaataaatctgactaaaatttagggaccctccacctcagtaaaatttctaggtgtccagtggtgtggggtctgttgagatattctttctaaggtgaaggataagttgctgcatttggcccctcctacaaccaagaaaaagacacaatgcctaggggcttatttggattttggaggcaacacattcctcatttgggtgtgttactccagcccatttatagagtgaccccaaagctgccagtttggagtggggtccagaacaggagaaggctctgcaacagatccaggctgctgtggaagctctctgctacttgggccatatgacccagcagatccaatggtgctgaggtgtcagtgactgatagggatgcagtttgtagcctttggcaggcccccataggtgaatcacagaagaggccctgccgtcttctgcagataactactctccttttgagagacagctcttggcctgttactgggcttcggtggaaactgaacatttgactatgggttatcaagtcaccatacaacttgaactgcctatcatgaactgggtgctttctgacccatctagccataaactgggtcatgcaaagcagcattccatcatcaaatggaagtggtatatacgtgatcgggctcgagcaggtcctgaaggcacaggtaagttacatgaggaagtggctcaaatgcccatggtctccactcctgccaccctgccttctctctcccagcctgcactgatggcctcatagagagttccctatgatcagctaacagagggagagaagattaggacctggttcacagatgattctgcatgatatgcaggcaccacacaaaagtggacagctgcagcacaacagcccctttctaggacatccctgcaggacagcggtgaaggagtcttcccagtgagcagaacctcaagcagtgtacctggttgtgcaggttgcatagaaagagaaagggccagatatgcggttatatactgattcataggctgtagccagtggtttggctggtcagggacttggaagaagcatgattggaaaattggtgacaaagaaatttggggaagagatatgtggatggacctctctgagtggtcataactgaagatatttctattccatgtgagtgctcaccaacgggtgaccttggggaagagatatgtggatggacctctctgagtggtcataactgtgaagatatttgtgttccatgtgagtgctcaccaacgggtgaccttagcagaggaagagtttaataatcaagtggatagaatgaccagttctgtggacaccattcagcctctttccccagccacctctgtcatagcccagtggtcccatgaacaaagtggccatggtggcagggatggagtttacatatgggctcagcaacatggacttccactcaccaaggctaacctggctatggcaactgctgagtgcccagttttccaaaagcagagaccagcactgagccctcaatatggcatcatttctcagggtgatcagccagctacttggtggcaggttgattatattggacctcttccatcatggaaaaggaagaggtttgtcctcactagaatagacacttactgggtttgcctattctgcaaccagtgcttctgcgaagactaccatctgtgggctcacggaatgccttatccaccatcatgatattccacacagcattgcctctgaccaaggcactcactttacggctaaagcagtgtggcagtgggctcatgctcatggaattcactagccttaccatgttccccatcatcctgaagaggctggattgatgaacgggagaatggcttttagaagtcacaagtacaacaccaactaagtgacaatactttgcatgcctgggcaaagttctccagaaggtcgtgtgtgctctgcatcagcatccaatatatggcactgtttgtcccatagccaggattcacaggtccaggaatcaaggggtggaagtggaagtggcaccactcaccatcaccccaagtgatccactagcaagatttttgcttcccgttcccacaatattacattctgccggcctagaggtcttagttccagaaggaggaacactgccactgggagacacaacaacaattccatttaactggaagctaagattgccacctggacactttaggctcctcctacctttaaatcaacaggctaagaagggtgttacggtgtttgctggggtgattgaggctattaagatgaaataagtctactactccacaacagagttaaggaagagcatgcatggaatacaggagatccattaggatgtctcttagtattactatgccgtgtgattaaagtcaatggaaaactgcaacagcccaatccaggcaggactaccaatggcccatcaggaatgaaggattgggtcactccaccaggaaaaaaaactacgacctgctgaggtgcttgctgatgggaatacagaatgtgtggtagaagagggtaataattaataccaattatgatcacgtggtcagttacagaaaggaggactgtaattgtcatgagtatatccaccttcttttgttaaaaacatgtttgtgcatggatacacttgtactaagaaaatatcttcattttatttcctttttcctttatcctgtgacataagatttattgacttcatatcagcatttaagtattgttgactttatgtaatagcatttgcgtcgaggattggtgcatttgcgtcgaggattggtgcattttcggttgtatgaaagatagttgtatcctgttaggtgtaattataactttattactgtctttatttgaagattatgtatgatctcaggagatgtgtatgggttcaagttgaaaagggagtagactagtgatggttaatactgagtgtcaacttgattggattgaaggatgcaaagtattgatcttggatgtatctgctaggtgttgtcaaaggagattaacatttgagtcagtggactgggaaaggcagactcaccctttatctgggtgggcaccacctaatcagctgccagagcagccagaatataaagcaggcagaaaaaacagaaaaggctagactggcttagcctcccagcctacatctttctcctgtgctggatgcttcctgccctcaaacatcagactccaagttcttcagctctggactggcttcattgctcctcaccttgcagacagcctattgtgaggccttattattgtgtgagttaacactccttaataagctcatatatatatataatatatactaataagagatatatataaatcctattagttatgtccctctagagaactctaatacaatgctcaagcaatgaaatttgtatataaattatgatatatttttataatgcaatattatccacccatttaaaattatgttgtggaagagtaatctatataaagaggtttattacacagcattaattgacaatgaaacagtttaccaagtactaagtaatgtgaagttcaatttttgtgttctctttggtgttcacaccaaaaggatctctttgtagtcctcttaataactttttgctgcattatcaaatccctaagatacaaaaaaacaaattcttgagttttacctaacctaaactaggtttaaccttaattatttttaaccaaatttcagtcaaattttgatgtttttgtttccctatctcttctttcccttcttctattttgtacccttgttctctttcagcaaggttttttttttaaccttttttttttgtttttttttttccatttccattgatcgaattgggagcaattatgaaaagcattttagaagttattgcttattaaaagaaattactactacatcaccttgcttccacctccatctttatcagtgcagataccaagagcctgaatacttctttgacttgcccctctgcctcaaaagccatgtccaaacctgatgtcataattctgaaatgtgttcagaacccactgctcttctttaatactgctgtaactgtgtgttgtgagcagcgaaagatgagacgtaaccaagtctgtgcatgtttgtatctttccacaaggtcagattttccttggtgttatttcaattgcaaaagtcacggctacatggagttcccaaggaagcaattctccttagcactacctgttcactcagtagttagcgccatgggcacacgggctcaagccacaagtcagtcaatattgcaaatcacacattgtagtataattaatatataaatgttatagattaaatattccatatcagacaaacaattaacatcaagacgaaaaggattaggaaaatggggtcaaatgaaccagtgcaaggagagtgacatggacaaggagagtgtcctggcctgatcctgatggatgtcaatgacttccactgaagagtcttttatttgggcagagccttcagcctcagatgccaggtgctaatcacaagtgacagcataaccgtgtctatcaagatggccgtcttgagctggtgaagtcttgctattcttatggccccggagtcttctggtgaggactgaattgatagtaaagagtgtgcctggttatgtccttatctgattgattgctgtctctattgattaggcgaacatctgatcgctgttggtatgatgcctgttggtatgatgcattctgaaacataagatgagtctttttctaagatggagttacagatgtcaagggtgctctataaacagcaccattcagtccttcaacacttttcacaggtatatctataacctaccaatagaccttattgctaacaatctcctcccctgtccaatccatacctcagcctgaaagttctttctagaatactgattaatcatgccatttgtctgctttttggagaaagttagaacttctgagaatggatttcaaagcttttgagcccaacctgattttccaatctcacctcagtttatcactccctgcctaccataccaaactccgcccatctcagaaagtataggaacttttgaagaagtgtttctgatggaatagtctaaacagtatgcacattttgccaggccgtgtgtgtggtaccactgtaaattttataatgacactagattttccaaccatttgtttttcatccaagtatttctgatcgttttagtaatagcaaattttttcacagtaatttgttttataagcatcaggtaggatcagatctccctcatgcaaacacattatcatctctttaacttgtgcggccctcactccatcctccaccctttttcctttcaggagaaacttactttgtggtttcactcttattttatttgtttaaaatgtcccatcctgttaagcaaaggattatttctccaaatgacctgtatcttttcatatttttctcttttttttgctcatgatgttatctctacttgaaaattccttgatatttgtcttcagtgagctaaatcctacagacattcaatgcttaccccagacattactccctcttcaaaggtttccctcttgatattcctaacacatcacctcacatgtgagtagaaagttgaatttattaggttggtgccaacgtttgcaccaacctaatacttaatctcctcattactaccactaacagagtctcaaaaaaggaagacatacctataacaaaagtctagaagcaaaagttttggagttaaatgacctgcttttgcctgggcacagtggctcacacctgtaatcccagcactttgggaggctgaggcgggcagatcatgaggtcaggagattgagaccatcctggctaacatagtgaaaccccatctcttctaaaaatacaaaaaattagccgggcatggtggcaggcgcctgtagtcccagctactcgggaggctgaggcaggagaatggcatgtaccctggaggcagagcttgcagtgagccgagatcgtgccactgcactccagcctgggcaacacagcaagactccgtctcaaaaaaaaaaaaaaaaaaaaaaaaaaaagatctgcttttgttcccagtttacaaatcactcaaatttcaatctactctctttctcttttgtattcccattgctctttgtaaatactctcttgaaacatttaacacactccttttctctcaccatacataaaatcaggtggtatgtgttaattcatttctgactttttcaggccttaataatcattaaaaacaattaaagaagataagaaggaaggaaggaatgaaggaaagaaggaaggaaggaaggaacgaaggaaatcattctattcagatttctaatagcctgtctatctaaacttggagttgaggtaatgtatgatccaagaggaaaaagaagcaacacggatagcttaagcgaaaattaaattcctgtaaagggtgaaagtttacactttctttttaggtggaagcttgattagaccactagaaaaaaaaaagagttaaattacttctttctcttccaatagtcttgtttattacattgcagcaaacgtttgtatatggaattgctttttaaaagcaggaaatctgcttctctgtgaacactggtttgtagctcctttttcattttcttgactaacaactcagttctataaattgtttcagtagttcaataaacaagtgctaaattgtgagctccctaaggataatgactgtgtcttattcagtaatgtttaccaggagcctcactaataccaggaaggcaagtttgcctacatttactcgagaatatattgttgttaattctctaaagaccagtggagtacatgttctctcaatgtctatccacatggcaaaactgtgtgaagaataacaaccagacagacctcaaatttgctcatttgatgatttatcttgtttgatgaaaggcacgatagcctaagaaaactctcttttctcagatactatttgcctcagatcaatagtatgcagaaaataccatcacaggacaaaagaaaattgtcttgactgcaactagagcacaaaggggaaaaagatgtaacaatctaaatttcaagaaagaagtctcagttaaaagcattgctctcagaagtcttttctggtgcctctgcagatgatcctattagatgctagcaattgctaagattgaaatactccaaggtgagagagaatgcttcggaaacacagactagatggcctatgattcgttaactttattaaacagcactgtatttcctgaacaaacaaaagagtacactggtatgttcctgaacttttaaagttttgcatttgatggagttcaggacacactaacccaggatgtggcatcttgacatttgagaaaatagtagaaacatgaaggtcactctcaccttccccttgccccttctcctctgaagcaggccataaaatgtagaaataattctctgaccttctctcctgtagcagagaataaaatcagctgactttcccgtgaagcagatcataaaatcctgtttcctgaggtgccctccttgtacctggagggaaagaatgttcttatctctgaagtcagagggacacagagaagaatctgagcaaacaggccttgctaagatggggtttgttaccattagatcataccttgttagtccaattacacttctgcacaactctccactcttcctcctacctaagcataaaaatatacgagtttccctgtttcttggggtcttcatttcttattttactttgtttgtttctttctttttttttttttcttttttcaagtaggagtcttgctctgtcacccaggctggagtgcaatgacacgatctcagctcactgcaagctccgcctcctgggttcaagagattcacctgtctcaacctcctgagcagctaggattacaggcatgcaccaccactcccagctaatttttgtatttttattagagacagggtttcaccatgttggccaagatggtctcgaacttctgacctcaagtgatcaacctgcctctgcctcccaaagtgctgggattacagacgtgagccactgtatccggtgggtcttcatttctgaaggctcccatgtcaggcaaaacttatattaaatagatttgtttttctcttgttaatctatcttttgttacaggtgccttagctgggaacattgaaacaggtaaggaaaagattaacactttttctcctttgcacatttaacttaattagagtacaccagactccaagtctctcttacttcttgctttcttaccccatgcctagctttaattcaaatttggtttaaatggttaattgccttagaagcctggtaaagtagtttttatgttaactaaacatcaaatgtgagtaaatcactctgctagatgctttacatagtctacccaattttcccttaaacaacttcccaaggcttatgttttttttcctatttattcttaggaaaactaagagtcaagtgatcaagtaaccatcaaggaaacattcataatctttccattggaccaggtctatctccatgtttattcaacacacagtggcgtcaaatggtatcctctttataaaacttgctcaaattagggattcttccccctccttccccatctccacctggaactccaaggtatgagagcaatctggctcatcccttcaatctcccaggtgaaccagcatccaaagaattcctagcaagaacaacttggcatagtgaaaaacaacgtgccagttgaggaattagatgttctgggctccattcacctgaccagctgtgttacctctgcctgatgatttaactgctcttagccttatgttccttatctttcactgaggttaaccatctagttacatagaatattttagtttgagttataatggaatctctaagagaataggtatatgttgtaagtattctttaaattaacatttaatccataaactgcaaattagggacattgcccacactttttaattttattttattttattatttttgagatagggtctcacactgtcactcaggctgagttgccatgacacaatcatggctcactgccgctgtgacctcctgggctcaagcaatcctctcacttctcagcctcctcaatagctggggctatgggtgcctgccaccatgcctggctgatttctgtatttttagtagagatttggtctcacaatgtggcctaggctggtctcgaactcctgggctcaagtgatctgcctgcctcagcctcccaaggtgctgggatagcaggcatgagtcactgttcccagctgctcacaactttaaaaaagaaagcttagtgtctcaactacattctaatgtcatatggattatgttccaacaaattctttttctcaaagaaaacaattatttaaaaaatcattaacatgtttgtttattatttgacatttaaaatgtgctgtttttatattgaaataactctatccaaagtgtacgaagagagaatggattccctaagatggtcaagtgcagcagcatgttagctatcagacaataataaattgggaatgacagatagtgctgaccatggtgcattccatagtgagaatggtaaggacttagcagcttcccattaaattaatgagaaccctcagcctttttggccagcaagattaagcaacataatggagacatctgaatacctttctaccaccctgggaatgaaaggcaagattgaaaggacaaccaattcagttaagtgtttggcttttcacccaggttacccctagattgggctgttattccactattctctcattttggctttcaagatcagcagcagctaaaatagcatttttgaagtcttttaggttgtttatacccttgtttcctagatcaataagaaatagaaagaccaggaatccctccaggtccctaaaactgtccaataaagatgtgccattaatttggatttataagtagggttttcattttatggtctgcttgctttttataatcagcaactcttcagtctgctatgtaaaaggaggcatagcaattagttaaaagctgaagtgaaaaagactagaatctaactgtggatttttcctcttctgtgaggcaggatgtgagaaatcaaagtattggattaggaattaggcgagtagtgccactaacaacatgtgcagcctggaaaaatccagtctctcaaagcctcagtctctccattggtaatcagtttgacagtatgatggctacatttttcagcatttctaactatattgctctctttaaaaacaaagactgatatggagaatgagtaggtaacagagcaccagtattcccaagaagatatatgcccaagaaaatgaatcctctcttgggcatacatcttcttctgtaaatgggaatctatttacagattttatttatttatttttcttgagacagagtctcactctgtccctcaggctggagtgtagtgatgcgatcttgggatcttggctcactgcaacctccgcctcttgggtttaagcaattcttgtgcctcagcttcttgagtacctgagaattcaggtgtgcgccaccacacccggctactttttgtgtagagatggagtttcaccatgttggccaggctggtctcacactcctgacctcatgtggtccaccccaccttggcctcctggagtgctaggattacaagcgtgagccaccacgcccggcctatttacagatttatgctatctatttttctactattgaacactcaaattctaatccatggaaattccatttatatattgaagagtaagcacacagaacattgttcacattgctactgttagtattttttaccgggacttataacatcacctgttaggtcaacattgatccaccagtcaacacaatttgtttgtatttttgctttctttaatccataatttaattctcttaacccccctgggaaaaatccgtaggcatcactttgaagtttatttctcataatcttttaaaacataggtcattaagtgactgtgtttccatttagaggattaatcctctgtgtgttttctaattccttaggctgactagtcttgtcatctcaatagccattaatatcttacccagagaacggaagcttaaagaaagctgttgaagatttaagataatctataagtttggatagttttttttatttatcatattcatttatttatttgagacaagagtcttgctctgtcacccaggctggagtgcagtgatgcgatctcggctcactgcaatctctgtctccccagttcaagcgattctcatgcctcaccctccggagtagctgggattacaatcgtgtcccaccacacctggctaatttttgtatttttattagagatgaggtttcactgtgttggcctgacctcaagtgatccacccacctcagcctcccaaagtgctgggattataggcgtgagccactgtgcctggccaaaggttttaaaattgtaaagacctgtaacattaacctttgcatagagaaacacatagtggggttactagatctgtatgtttcacagacttctgagagagctcaagccccaggaaaataatgaaatcaaactttagtgtccaaaatttcttagtagttttttatgaaagtctgcaaggaaaagaaatagcaacattgagcacttactatttgacaagtcctttctgtatattagcctgctttatcttatcttagccctaaaagtgtcatgagtcctggttcacatataaagaaaccgaggcttagcaatgtaaggattcttcctttgactctttctatgacaggtagtcaacagcaaaatcagtattccaacactagtctataaaactctaaaattgatgttttcactctgtcactgcttctcttgcaaaacctattagatattccctttatttctgcccttcatgcttctttctctctattgattgattgattgattgagacagggtttcactcccattgcccaggctagagtgcagtggcgcgatctcagctcactacaacctccacctccccagttcaaacactcctgtctcagcctccagagtaactgggactacaggcatggaccactatgccctgctgatttttatacttttagtagagatggggtttcaccatgttggccaggctggtcttgaactcctgacctcaagtgatctgcccaccttggccccccaaagtactgggattacaggtgtgagccacagtgcccgatcactctctccatctttaaactcaaaggtgaagactttttagttaaattttcttccagctaccaagcttctgctaataaaataatttttgttttattagagttagcatttattgagaactatgtggcctaaactgcactgtagggtttggcactataagaatagcgtttacagatttgaaaacaaaggctaaaaagatttagtaattgcctacgatgagcttgttggtgagttctcaagaaaaaaattcaatcccttatccatgtaactatagagtgtgcagttagccactatttaaaaatctaagcctcaggaagaaaatatatattaaaatttcttttatttcaagtagaggggatttaattaaatttgtatttttcaaagagatttggttgcttatctctattctgaaaattctcttcagccttttgctttttgaaaaacgatttgcactatgcctaagaaaaacaagaaccaaacaaaatgccactgatattatggtataccactgccatctaatggccactacggctaacaaattgcaaatgttttatgattgaaaatgaccaatgtacaattattaaaatatggagatgcaaggttgaatttgaagggaaatgctagagtagtgtaatttgattttattacttactgtggatctgagccatcccaagagtaaatacacagttttagctcttcctgcgtgtgtcatgaagtgaacattagtgttagaggcctttaaacaatgaattgtaaaaagcaaacacaccatgtgcagttgggaattttgctttaaattttgtaaactttttgggtaagcacgattttaagtcgcatctatatatttcaaaaacattttggaattagctgtgtgaatgccatgctgggcttggtgactgatacatacactgagcaaaaccaactggtgttttggtccatagtagcatggatggtactaccggatacagcattttggatttttattgcatgtagattaatgtaacacttcatttatcatttgtttgtttgtaaatttgttcaaacacttctttatttgttagcttatttaaaccacttgtgccagagatgcctgtccattttgcatggagaaaccagagattttggattcagatatgtttagaaccatgagttggaaggacattcagttactcatttagcaaatatttattgagttttggtgaggtgttgcacacagagtaaacatgacatactcttcttcccttcaaagtaattgtagaagtatcaagtaactatagaaagcagaaacacagataggcaaacagaagacaaaatatggctagtgggattgaggacatgttaccccaacatgtgagaccttggcttttgagaaaacagcagaggcagaaaggtcactctcactttcccatcacacttttctcctaaagcagactacaaaatccagcgagcttactctttgaccttctctagaccctcatttcagaggcatcctccctataccaggaggagagaaacagggacacagaaaagaatctgcacaagcagaacttgctaaatcccccctcccccagtttattatcactagattatgccctctgtccaatcacaattcttgacaactgttcactcttaatcaaactgaagcattaaaatacataagcttacctgtttgcgggatcttcaaatttctgaagcctcctctcttacataaaatttatattaaatgaatttaaatcctactcaaactattcctaaaaatagttgaagagggaatatttccaaactcactctatgaggccggtattaccctgatatcaaaaccagacaaagaaacaacaacaaaaaagagaaaactacaggtcaatatctctgatgtatattgatgcaaaaatcctcaacaaaattccagcaaactgaattcaacaatacattacaatgattatttatcatgaccaagtgggatttatccctgggatctaaggatggttcaacacacagaaaatcaatcagcatgccacatcatatcaacagaatgaagaataaaaccatatgatcatttcaattgatgtagaaaaagcattcgaaaaaattcaatatcccttcatgataaaaaccctcaaaaaactgggtatagaaggaacatacctcaacataataaaagccatatatgacagacccacagctagtatcatactgaatggggaaaaactgaaagccttttctctaagatctggaacatggcatggatgcccactgtcactactgttattcttcataatactggaagtcctagccagagcattcagacaagagaaagatgtaaagggctccaaattagaaaggaagaaatcagattatccttgtttgcagatgatatgatcttatatttggaaatacctaaagatttcacaagaaagctataagtactgttaaatttactgataaattcagtaaagttgcaggatataaaatcaacatacgaaaatcattagcatttctatattccaacagtgaacaatgtgagaaagaaataaaaaatagtcccacttacaatagcaatacataaaattagatacccaggaattaatttaaccaaataagtgaaagatctgtataatgaaaactataaaacactgatgaaggaaattgaagaggacaccaaaaaatggaaaaatattccatgttcatggattggaagaatcaatattgttaaaatgtccctactacccaaagcaatctacagattcaatgcaatttctgtcaaaataccaatgacattcatcacagaaaaagaaaaaaaattcctaacaattatatggaacaagaaaacatccagaatagccaaagcaatcctgagtaaaaagaacaaaactcgaggaatcacattacctgacttcaaactatactacagagctatagcaaccaaaatggcacgatactgacataaagactgacacgtagaccaatgagaatagagaacccagaaacaagacatgcctatagtgaatatatttttgacaaaggtgccaagaacatacactggggaaaagacagtctcttcaataaatggtgctgggaaaacttgatgtacagatgcagaagaatgaaactaggtccctatctccaaccatatacaaaaatcaaatcaaaatggattaaagacttaagtctaacacctcaaaatataaaactactacaagaaaacattggggaaattatccaggacattgatctaagcaaagatttcttgagcaataccccacaaagagggacaaccaaagcaaaaacggatgagtaggatcacatcaagttaaaaagcccctacatagcaaaagatacaattaacaaagtgaatagacaacccacagaatgggagaaaatatttgcaaactacaactaactactcacctgacaagggattaataatcagaatacataaggagctcaaacaactctataggaaaaaaaaaacctaatattccaatcaaaagatgggcaaaaggtctgaatagacattacccaaaataagacatacaaatagaaaacaggcatatgaaaagtgctcaacatcactgatcatcagatatatgcaaaaaaagaaaacatctaacaatgagatatcatctcaccctagtcaaaatggcttatacccaaaagacaggcaataacaaatgcttgcaaggatgtggagaaaagggaacctccttgtacactgttggtggaagtgtaaattggtacaaccactatagagaagagtttggaagttcctcaaaaaactaaaaattgagctaccatatgatccagcaatcccactgctgggtacatacccaagagaggaaatctctatattaaagagatatctgcacacctatgtttgttgtggcactgtttacaatagctaagattaggaggcaacttacatgcccatcagcggataaatggataaagaaaatgtgaaacatatacacaacggagtactattcagccataagaaagaatgagatccagtcatttgcaacaacatgatggaaccgaagaagatcattatgttaagtgaaataagccaggcacagaaagaaaaacatcgcatgttctcacttatttgtgggatctaaaaatcaaaacggctgaactcatggacatagcaatttgaagggtggttaccagaggctaggaagagtagcgggggatttggagagaggtggtgatggttaataagtataaaaaaaaatagaaagaataaataagacctactatttgatagcataatagagtgactatagtcaataataattctatatttttaaataactttaaataacttttaaataactttaaagaatgtaattggattgtttgtaactcagacaatcgagaggattttccatcatgtgcttattttacattgcatgcctgtatcaaaacatctcatgtaccccaaaaatatgtacacctactatatacccacaaaattttttaagtaaaatttaaaaaaaattaaattgtatgcttttttttttttgttaatctgtctttttttatcgggatcttggccatgaacctaagatgagaaggaaagatatttcttttcccctacatggcattgcaaggaatgagtgaagaacaatgtctccttgcttatatgtgtgtctctagaagtcagcaagcacctcacacgtggtaaacacccaaatgttactggatgaatgaataaagtagcattaattgagttaaacgtgagtgttataagacacctaaccacaattcgagaggctgtctggagtaggagactgggctaaggcatgattaggcataagcagccatgagagtcggtggagcagtgtgtttcagacagacctcagcgatctttttttctctctctttttttttcttttctttttttttttttttttttttttttttgagacagagtcgcactcagtcgcccaggctggagtgccgtggctcgatctcgctcactgcaagctccacctcctgggttcacgcccttctcctgcctcagtctcccgagtagctgggactacaggcacctgccaccatgctcagctaattttcttgttgttttttttttagtagagacggggtttcaccgtgttagccaggatggtcgcgatctcctgaccttgtgatccaccctcctcggcctcccaaagtgctgggattacaggcatgagccacaacgccaggccttttttttattttagaaatctgtttttctttgttttcataggttattggggaacaggtggtgtttggttatatgattaagttctttagtggtgatttgtgagattttggtgcacccatcacccaagcagtatacacagcacacaatgtaatcttttatcctttacccccttcccatcctttcccctgagtcccctgtggcattcttatgcctttgcatcctcatagcttagctcccacttatgagtgagaacatgtgatgtttggttttccattcctgagttacttcacttagaataatagtctccaatctcattcaggccactgcaaatgccattaattcattcctttttattgctgagtagtattctagtgtgtctgtgtgtgtgtgtgtgtgtgtgtatgtatgtgtgtatgtgccacagtttctttatccattcattgattgatgggcatttgggtcggttccacgttttgcaattgtgaattgtgctgctataaacatgcatgtgcaagtatctttatctttttcgtataatgatttcttttcctctgggtagatacccagtagtgggattgctggatcaaatggtagttctacttttagttctttaagaaatctccacactgttttccatagtggttgtactagtttatgttcccaccagcagtgtagaagtgttcccagttcaccacatccatgccaacatctattattttttgattttttgtttatgaccattcttgcaggagtaaggtggtattgcattatggttttgatttgcattttcctgatcataagtgacattgagcattttttcatatgtttgttagttatttgtatatcttcttttgagaattgtctattcatgtccttagcccactttttgatggaattgtttgtttcttaccttgctaatttgtttgagttgattgtagattctggatattagtcctttgttagatgtatagattgtgaatacgttctcccactctgtgggttgtctatttactctgctgacttttccaaatacttacagtcaactgatcttcagcaaagcaaacaaaaacataaagtgggaaaggacaccctattcaataaatggtgttggaataattggcaagccacatgtaggagaatgatgatggatcctcatctctcaccttatacaaaaatcaactcaagatggatctaggacttaaatctaagacctgaaactataaaacttctagaaggtaacattggaaaaacccttctagatattggcctatgcaaggatttcatgaccaagaacccaaaggcaaatgcaataaaaaaagataaatagctgggacttaattaaattaaagagcttttacatggcaaaaggagatctggtttttaaacctctgtcagtgcagctatgattctaatcctgagtgtcattacttatatcttaagtaaatctctatacctttcttggccttcgatcttcatttaagaatgaggaatgtgatagttaattttatgtgttaatttgactgggtcacagggtacccagatatctggtcaaacattattctgggtgtttatatgaagatatttttggatgagattaacatttaaatcagtagaaatgagataaagcagattatcctccataatgtgggagggcgtcatccaatcagttgaaggactaaatagaacaaaagactgatccttactcaggtgagagcaaattctcctgacaggcagccttctcactgtcatattggctcttcttcccaattagcctcttcttttctaattgcttagcaaagttgtgcaggggattgctcaaaaatatgcaactcttcagaagcctaggcttggaaccatcatcttgtcactcccgccacatttgatttgccgaaacatgtcctgaggctagcccagtttcagaggagaggagatggacaccacctcctgatgggaagaaagttaaagtcacatcgtgaagaactgggaatgatttttgcaatcagcctaccacatttatctaccatcttcatgcattttccaaaaattcctttaccaactctttaacattctatttattcatgaggtctacattaccataaccatatatgaaattgtgggtttaaagttaaaacttttttatgtgcattagacattataactcttaaaaattgagagagaaaaacttacccacatacttgaataaggtagagttcagaagtttgtacgggattcagagactgatgggaaattctctaacatgctgtgagatagtaaaaatgatctctctaacaagtactagagtccctgttgtgtccatagcactagaataaatgcaggggaaaggactaagaacttaaaacctcttttaggagagtttgcaacgcagagtggccaacagaatcatcttgtccacctccacactagccaacccataaagaatgtaaaccctatgtctatcatacaaagaataattaaaatggtatttggaaaaggaggtgatcaagtggaaaggagggatagaagaagaaatcatggactgaattggcttcaagctagaccttcaaatatgagtaggagaagaatagataaccttaaggtagggaggctttttaaatgggaaagaagccccagctagaggctcaaagacagtaaataaaaaaccacagttagaagtcagtaaaattagatatataatgttaaaaccaacattattcacattatggtatgtaaatgacattatataatacttagttttggtcatcaacatggtggtcattatgcacatctgaatttaagagagacaggaaatatatataaagagttgagaaatggggatgaattctacttctggtaaggtagggctgcatactttgaaccaatattcctactaaagacaaggtgaaaaaatggacattttatcaaagccattagcctaatgacacaaaaagctcagaaaatggtgaaaaattatcaggtgaagatccaaaagaagattaaagtgcagaaaagtgaatccagctgagagggtaatttttcccttgggaccattagctgctcaggacctggccagcacttttgatggcttctcagggataaagacaccaaaggtggcatctaggcccacattttaagcttggggccctaaagactacattctgaatcaacctcaagtagcactgccctcacactgactgcagcccagcttcaaagcagctaaatctctgaaattgagttaaggtgttctaaggctaccagcaatttagaaattttgtttttcagcctgtttcatgttcctttcagctaagttttccttctactggacacaggtggaatctcaatgagaaaagatattcatgagactattaaggaaatataaaatgatgtatcatgtgtgctgcaaaagggaattttatttattatgctaaggaatttagaggaaaacattgcagctttgtttattttaaaaaataataaaattaaaagttaaacttttttattggtggccaaccaaggaccattcatatatttggctgtcttttgacatctcctttacttgaaaatccatttagaaggcttttctaatgtgctatgtgtggaaattggttgcaagatttagaacaaaaataattctgagtgacatgtgaattatcaagtcatagctgagagaactaaatccagtttctgaagaaataatacagttagccttgtaccattggctctgatggagtttgatttttgtgaggtatggatgttttcagtttttgatacatagtctcaagatataactaaaagtaggctttggtgctatttttggaggtgtataatctgctactctacttaaaatgttttggtacatcttcctgtttaattcatttctctgagtcccaatatgtcagaacaagatgtcctccttctttcattttgggggacccaatttttatttctgtaattttaattatcacttgtctaccctcttctttacagtgtttttacatgtgggccactttgttaagtgactaagcaaagcctgagccaccagatgctgacttgcaggaaaaaaatgaacttaatgtactccagtaaatccagtggtaaaatttgccacagccaggtcttatagtacaacatattaaacaggaatctgtgtctaagatattcaaaattattttaaatttttagtaaaatcagcagagaataaccatgaaataaaaaaaaaatggaagcaaatataaccacatcataaacaaaatgtactcttcctccaaaccttccatggtaattaattttatgtgtcatcttaactagattatggtgcccagttggttggtaaaaccctagtctacacattgctgcacagtattttttagatgtgattaacatctacaattggctggctttaagtaaagcagattacactccataatgtgagtgggcctcatccaatcagttgaaggccttgagagtagagactgaggtttcccaaagtagaagaattctgtctccagattgtcacaaggaaattctgcctgagtttccaccctgagtttccacccttcagactcaagaatgcaatatcaactcttatctgaaatctgagtccagtttttctgcctgccccatgaatttcaggcttgccagtcccaataattgagtcaattctttaaaatagatctctctctctcaatctctctctcaatctctctctctctctctctctctctctctctctcgtgtgtgtgtgtgtctgtgtgtgtgtgtgtgtgtgtgtgtgtgtgtgtgtgtgtttccctggagaaccctgactaattcttacaccttccaaggaaggaataagtttccaatggttatttgtaacattccatgtaaatatctgaatgcatctaacatacatgtagagtagtatttttaatattgcctttgcattttgtttaaaaccaaatggatagtagccacttataacccatttattatgtatagctgttttaatactttccaggaggttatgttcttttgaccctctgaggtttcttcccatagtttcaccctacttttgctttcattctaatccttaaaagagcatgaaagcttattcttttcctccctgagtaaataaaaccaatatagttatgtcatcttgtggccctttgtgtattttaggccaatttttttttcctttcatgaaagcaactattgacacaaaactatttaaacaactattatttacatctataggaaaaaatactactgatttttataaaacagttgccagagaattatgattaagggcaatttacgaaaggcatgagtgttacggccattgctcagggcaacaactagttgggaagaaacaaaaataatttgttacaaaagaaaagtgagttagtaatggaaaagtctagaagataagtgtttgatgagtatatgaagactaattttgacattttcattctcagcttcttgtaagtaggagaaaagagttcagttttagacaatcaaatggaaaattctaaaaggtacatttaagaatttcttaatcttttctcataatctaatcagactgactatatcacaaatagttgtcatggaaaagaaaaaagtgtaggcagctaagggaaggagatagaggaaacaaaaaaagaacagttgataaaatatccaaaattgcataatacattaaacttataatttttcaaatgtctttatatagtcacttggagatgatgattaactgtattagtttcttcaaaacacacttgggaaggttttaacgaagttatataagtaccagtgttcacagtatggcaggagaattttatcttagcaactggtattagtgatctaaaaatgtttcgcccttctatgagcaccctaaaatctgttcttacacacaccctccagattttttccaacttaaattagcaagtctttgactctttttatgtatatgacatcaaccaaacttgcaagtttttaatttgtagtttattccctttgctatactgacaccaaactctagtgacaggtgtggacaaagtagggataagagagacgtgtgggtaatggactgtttctttaaggaaatcactatggtgaggcggcaacaaaataatcctcaagcaatggagaaagaactctcagacaagaaaaagaaatctgcttttgaaggtaggagatgcttcatggaaggtgggcgaaaaccacctatagatctgatttctggttcttgaatttagatatttgggtttaaaattccctccctttacaccatctaattctactagagtcatgccaccatacaggtcttccatttttgctaccatactttggtggcaacaatgctgtctcccaaactttgttcccaagggcacacaggatgacataattagcagtacacaggatgacttaattagcagttttcacaactctttgtcatggattactgaattccaaaaccaaaatattagggaacttcaactagatgcattcagaccagacaaccaatcccattttctccatattttcccagggatatttagtttgtgtctatctgctttgctttctgtatcaattaagaggttgttttgcaataagtaacagaaacatactgtggatagcttaaatacgtatactttaaggatatcaagagctcactatattaatagaaggcttgtctgaagcagcatctcttagcatctcatctggcccagatgtgggcactgctgttgagaatgaattgctatcgttcttgtatgcaccacgaagtaaagattccaaaccatgtgtggaaaatccagttgagagaactaaatcatcgtaactgcttggccgccaggctgttccttatcctctttgccctttgcagtgggaaataagatactgccttccaaaaggaatcatcacggtgggaaattacctgcaaataggacaccacgccagctcaaaatacaagtgggtactgaggttccttatccttagatgttgctatccttatactcagcataatcttcaccattgactaaaatgccctctaatgtagataacttgtatttgcctcttagagaactctgaactgctgccaccttgaacatgtcttggcttcttttttccccctagtaaggatcaaaagcaagttttttttcattgtaattgttcagtcatcgtcaatctattaacttgtgttgatttgcaaggcggcagccaaatgactgtcacaataacaaaagccaagtctcctttgattgtagaatcatcaataatatttattcacttgtctctggcatgagacaattacttttctgctccagaaaggccgttttaattgaacttgtatttcctgcttcccaggcattttgagtaggaagagggcagacctcctcaccatctaatgcaattgttttgcatcatcttaatttgagtggaggctgacattcctgaattcctgactacatgccaagctgtggggtgtggcaaacagctcagttgttttaattccagaaactgagtgatgacattttgctaagcttctgtcatatacgccctcatgaagggtgggaaaattttgaactctgggcttcagtttatgtgttatgtttagtaagtgtgtaagtaactaaagcacctttgtttacttggttttgacatttggagaatgaggttttctcaccacaagatagaataccaagtgaatcttgttcttcacacgttcctgataaagatgaagaaacaaatgattgagaagttaaatgataattaaaaaaatgtggtaaataccaaatgaatagtgtaggcagaaaagggaataagaaagaactttggtgacggtcatggcagcgggaatggtgggctatccctttaccccaagttctgcatcacagagaacaggtttaattttttctatgttcagataaaaatcaaccaaaaaattcttttaatttgtactactgctaggtaaatatttctgcctacattcccctaggagaagatactaatgcgtaaacttattccactactaccccaaataactgttcaaacccaaagtaaagacttggaccccaagcctgaatctggtacatgtgatccctaggttgccagccttaaatatgtataactttgcattgaacccaaggttagatcttgggggggaaatctttgagttgctatgtccaagggaaaatgtctatgaatgtgacctggggcatcatgtctttttgcccagaccctgagaggacctgcatctgttttcagaccaacttccatctggaacttaatatccgtacaaaatggatgattttaggggactgcctgtggcttaggcagaattgtagagtcaaacagagaaagaaatcatctttttaataaactggtgctataggattttccagtttaaactccagttacccttcctttatccctcctgaattggttttataagtttaaaagaacagacaatgaagtcctgtcagactggttcacacaaactccacagcacctgacaggtttgaaaaacactaacatttgagtattcccaagtgtcacacactatctgcacatattctgggtatatgagtatggaaaggaagggacttctccaaaatattttacaaaccctgaattcctctaatggggttagaaactcctttcctaaatcacaacttcaagaaaaaaacttctggaatcctacaatatagtatcacctctaaattttttctgtcaaatccacagtacaataaagacttcataaataaaacttataaataaaatttataaataaaacttataaataaaattcatttataaataaataaaatttacaaataaaatttacaaataaatttatttataaataaatttacaaataaaattaataaataaatttatttataaataaaattatttatatgtacataacatttataaataaaatttatgtatttataaataaaatttatgtatttataataaaataaaatttatttattcataaataaaataaaatttgtaagtaaaacttatttattcataaataaaataaataaaagagtagatgggactacaggcccagataattgtttttttttttggtagagacgaggtttcaccatgttggtcaggctggttttgaacttttgacctcaagtgatctgcctgcgtcagcctcccaaagtgctgggattacaggtgtgagccatggctcctggcaagtcttgcctttaaacataaaatgccaaggagtaacaaagtgaaggaaacagacttcccagaatttttggtgctattctttgatagcaatggcactagtaagaggagaaacctacactgtattttctttgtccctgattgccatggagtaggtcatccaggggagggggtagtgtggtcttttggaagaatatgaaaaggggagttagaaagaagaacgaaggaggtatggtttgtgatatgatcttgcccttctcaagtaattagaaatttgaaggtgcttgagagtatcaaatgttactaaattgtacacatatttctaattccttactcctaaaacatcacttaataaaattcacttaaaaaaaaaaacctctcatcagaggtgtctagtttttgatttaacagcaggtgaggatcttagaggttgccgccccattctagcaagtaaaaagttaaacagcctgaaaaaatcagcaactcttgtcaggtctgtaagcaaagtgaggtcccagagcaaatcgctaatcctaaaattggagagatggacaagtgactacagagaagcacagcttaccagagcaaaaatctccctggaaaccagtaggaaaacctgaactgtaatttatggattgctgaaggctcagtatggacaagtctgatagataaaatctctaggggaacccaatcattgtggggtccccataattttgtgagttttgcctcctggagtcctaacaggttctctcagtgaacagtgaagaaaaatctcattcttccagcacagggaggggaaaagatctcaccttgaaatacaccagagcattctgttctacttaacaaggttgccctcaggagaagctatttaaccagagcctaacttaatgtggttttctcagagtctgcgtgtcctggtaaaagagaaatacccaatcccagtcccctctggcttccagatagggaaagagaaacccaactccagcccagtccagccatcgtgcctcatgagaaagggaaggggactgaaaagcccttgtgaagttcacagtccaggtaaaagctcaataaacactgacacctattcatgagaccataggacacttctcctcctttcacatctttccaccatgttactaaagtcctgttcacagtagtttctttaactctatccatcgtgtccagctatcaagaaaaaaattacaagctgtcctaaaagacaaaaagcataatttgaagggacagaggaagtattagaaccagactcagatatggccaggatgttagaattatcagatcaatgattttaaacaacaataaataatgtgctaagggatctaatggataaagtaaatagtatgcagggacagacagatgatgtaatcagagagatggaaattccaaaaaaagaccaaaaagaaatatcagtgatcaatcatactataacagaattgaagaatgtatttgatgggcttattagtagactaaaattggccgtagaaaaatctttgagcctgtggatatctcaatagaaacctccaaaacagaaaatcaaagaaaagaaaaactgacaggaacagaacagaatatccaagggctaggaaaactacaaaaggtgtaacatgtgtgtaatgcaaataccagaagaataagaaagagagaaagggacagaataagtatttgaaataataatgactgaaaatttccccaaattaatatcagacactaaacccaccaatccaggaagctctgagaacactaaggaagataaatacacccccccccgccaaaaagtacacttaggtatatcattttaaaactatagaaaaatcaaagataaagaaaaaatcccagaagaagccaaaagaacagaaaaccttacccacagagaaggaaagataagaattacatccaccttctcctcagaaaccatgcaagaaaaaaaagagtagagtgaaatatttaacatgttcagggggaaaaaaagcaaccgaactagaactccgtgaaattatcttcaaaagtgaatgagaaataaaaactttctcagacaaacaaaaattgaaggaatgtgtttccaatagacgtatgtagcaagaaatgttaagaggtttttttagcaagaagaaaaaatatataggtcagaaactcagatctacataaaggaaaagcataggaaaaggaataaatgaaagtaaaattaaaatttttaattttttcattcttaattgatctaaaggataacagtttttaagataataacaataatatgtatgtgtgtatacatgtgcttatttatgctcatgtataaattaaatgaaatacagcaatcagacaaaggataggaggaaagaattaagattattttgttattataaggtactatacatactacccataataaatggtatagtcttattaaagtagatttgaattagttataaatgcatatggcaaacttcagggaaactacctttaaaaaagtataactgatgatctaggaaaggagaaaaaataaaatcatataaaattcacaattaaaatgttaaaagacagaacaatagtgtgctatagattgaatgtttgtccccctccaaaacttatttagagattgaattgccaatgtaatggtattaggaagtgagaccttttagaggtgattatgccttgagggtgccactctaaggggtgggttttatgtcttaataaaagggttttcagaagtgggctctctctcaactcttctgcttttctgctgtgtaaagaacaatattcttcccctctggggaattcagcattcaaggtgtcattttgggagcagaaaccaggtcctcagcagatactaaagttgctgctgccttgatattagacaatatcagcctctgtaattgcaagccaatagattcctattcattatgaattacccagttcgtggtatcctgttatagcagcaccagcagatcaagaaacattggaagacaaaaataggaacaagcaagtaaagcaatgaattaaaaacagtaatgaatacaatagatactaatccaattacattaataatcactttaaacatcaatggtctaaatgcaccaattagagaacaaagatggtgagagtaaatcagaaagcaggacacagctagacgttgtctataagaaacacactttagttataaagacatacagaataaaagtaaatggatggagacagattaaccgtgctaacactgatgaaaagaaagtggtgtcactattaattttagacagagtagacttcagagcaaggaaagttatcagagattaagaaggggtcaatgataaaggggtcatttctccaggaagatataataatcctgaacatgtgtttgccaataacacgatgtcaaaatatgacacaataagggattttggcatgtatttcaaaactccttgatcagaaaagggacagacccagcagtcgaaaatcaataagaacatagtaaaattcaacaataccatcaattaactggatacaattgacatttaaagagtactttattcaacaacagtagattatatattcttcttaagctcacatgaaaccacatgagatcacaatttgggccataaaacacacctcaacaaattaaaaaaaatagaaattatacaatttccattcgcataccacagtgaaattaaactacaaatcaatagcaaaaaggtagctgaaaaatctgaaaatatgtggagattaaacaacatacttttaaatgactcataagtcaaaaaggaactatccaaaaaaatttaaatattttgaactaaacaaaaatgaaaaaaattaaaatttgtgtgatacaatgaaagcagtgcttacaggtaatcttacagcattgaatgcacatgttacaaaagaagaaagatttaaaatcaattatctaaactttaacttaggaaactgggaaaagaagagcaaattaatttcaaggttagcatgagaaaagaaataataaaagttaaagcagaaatcaatgaaactgaaaatagaaattcaattttttaaaatcaacaaaaccaaaagctggttctttctaaagatcaataaaattgataagcctctagctaggccaagttattaaaaatgagagaggatgccgggagtcggggctcacgcctgtcatcccagcactttgggaggccgaggcgggcggatcaggaggtcaggagatgaagaccttcctggctaacacggtgaaaccccgtctctactaaaaatacaaaaaattagccaggcatggtggcgggcgcctgtagtcccagctactcgggaggctgaggcaggagaatggcgtgaacccgggaggcggagcttgcagtgagccgagatcgtgccactgcactccatcctgggcaacagagcgagactctgtctcaaaaaaaaaaaaaaaaaaaagagagaggacaaaagttataaataccagaaatgaaagagagggcattactatgaatcccatggacattaaaatgataataaagaaacactatgaatgactttatgcccataaatttgatattctagaggaaataaacaaattccttgaaagatacaatctgtcagaactcacaaagaaaaaataaaaactctagcctgtatctatttaaaaaaattaaatccccaaacagaaagcaccagaccctatggtctcactggtaaattctatcaaacatttaaaggaagaaattataccaattttctacaatctctttctgaagataaaatcagagggaataattcctaacttatctatgaagccagcatttccctaatactaaaagcagacaaagacattacaagaaaagaaaactacagacctgtatctcttatgaatgtaaatgcagaaatcctcaacaaaatattagcaaattgaagccaacaatatatagaacaattatacaccatgaccagtgggatttatcctaggtatgtgaggctgtaggctcagcattcaaaaattaattgatgctatcatcatactaacaggctaaagataacaaatcacataagcatataaatagatgcagataaagcatttaacaaaatccagcacctttcatgttaaaaactttcagtaaactagaaacagagggaaacttcctcacctgatacatagtatctatgaaaattattattctgaatggtaagacatgaaaaactttcctactaagatgaggaacaaggcaagaacgtccctcctcaccactccttttcaacattgtactagaaatcttagtgcaataagacaagaaaaggaaataaaaggaatattgattgtaaaagaataaataaaggtgtctttatttacagatgacatgattgtctatgtagaaagtctaagagaatcgaccaaaaactcttgaaactaataagctattaatatatagcaaggttgcaagataaaaggttaatatacaaaaagtcaattgctttcctatttcctgctttcctttcctgtatttcctttaaataaatcaatttgacattaaaaacgcaataccatttacattagcacctaaaaaacaaaatacttaagaataaacctaacaaaatttatgcaagatctatattaggaaaactacaaaactctgatgaaagagatcaaagaactaaataaatacatattgcatgttaatgaataggaagacaatattgtgaagatgtcagttgttcccaacttggtgtatagattcaatgcaatctctatcaatattccatcagttattttgtagataacactaaactgattctaaaatttatatggaaaggcaaaatatcaaaatagttaactcaatattgaaggagaagaagaaagtcagaggacagacattacttgatttaagatgcattacaaagctatagtaatcaagacagtatggcaataataaacaaaagatcaatggaacagaatagaataccctgaaatagactcacataaatatattagttaattaatctttgacaaaagagcaaaagcaattcaatgaagaattgatagtgttttcaacaaatggtgctgaaataattgcacagccacatgtaaaaaaattaatctacatacaaaccttacacccctcacaaaaaatgaccaaaatggatcacagacctaaatgtaaaacataaaactataaaactcttggaagctaacaacagaaaatctagaataagcttatcgaacccagggcccacagactgcatgtggcccaggatgactttgaatgcaggccaatccaaatttgtaaactttcttaaaacattacgagatgttttttgtgtgattcttttcaactcatcagctgttgttagtgttagtgtattttttgtggtccaagacaattattcttcttccaatgtggccagggaagccaatagattagacacaccaatctagaaaaccttgggttattctagattttttcaatatgtgactttttcaatatgacatcaaaagctggacttcactaaaattgaaaatttcaaacctgtaaaaaacagtgtcaaaagaatgaaaagacaagtcacagactgggagaagatatttgcaaaagacatacctgataaagtactgttatccaaaatacacaaaaaactcaccaataagaaaacaaacaacatgattttaaaatggtccagaaaccttaacagacacctcaccaaagaagatacacagacggcaaataagtgtacaaaaagatgcttcacatcatgtgtcatccgagaaatgcaaattcaaacaacaatgagataccactacacacaaattagaatggccaaaatccagaacactgacaataccaaatgctgccaaggatgaggagcaacaggaactctcattccttgctggtgggaatgcaaatttgtatagccactttggaagacagtttggcaattcttacaaaactaaatatactcttgccatatgatctagcagctgtgtcccttggtatttatccaaaagagttcatgatggttaattttaggtgtcacttgactggattaaaggatgtccaaatagctggtatggcattatttctgggtttgtcgatgagggtgtctctggaagaaattgacattcaaatcagtggactgaggaaggaagattcgccctaattgaatgtgggcagacaccatccaatcagctaagggcctagatagaacaaaaacaaaggaaaggtgacttctctctctttcctgaaactgaggtacatttcttctcctgcccttggatatcaaaactccaggttctccagcctttgccatctgagatttgcaccagtggcccaccagtttctaaagccttcagcttcagactgagggttatattgtaggctctagtcctttacatttggactggctttcctggctccccagcttctagatggcctattgtggagctcaggctccataatcccatgagccaattgccctaataaattccctctcatctgtctatctatctatctatcatctatctatctatctatctatctatctatctatctatctatctatcatctatctatctatcatctatctatcatctcctattggttctatctcttaggagaactctgactaatgaagaattgaaaacttaggtccacacaaaaacctctacacaatgtctatagcagttttattcataattgccaaaacttggaagcaacccagatgtcctttagcaggtgaatggacaaactatagtatatgcatacaatggaatattgttcagtgctaaaaagaaataagttgtgacaccataaaaagacactgaagaaacttaaatgcatatcactaagtgaaaaagccagtctgaaaggattacatacagtatggtttcaattctggaaaaggcaaaattatggatatagtaaaaagacaatgatatgctcccttcagaagcatgtacactaaaatgggagtgacacagagaaaattagcagggcctttgcacaaggatgacatgcaaattcataaagcattccaccttttataaaaagagcaaaccctcatgtaaactataaactttggcaggtgagctgctgctgctgcatcaaggtaagctcatcagttttaacaaatgtaccactctcatgggggatgttgataatggggaaggctgtgcatgtgtttgggcaggaagtatttggaaaatcttggtcccttcagctcaattttgctttgaaactaaaactgttctagcaaaaagtccagtagaaataataattttttaaaaaaactaccctctactgtgaaacacagtcccagacctggggggcatggataaagatttctttaagcaaattctgcgtgcattacactaacattatagtaaaactcaattacttgaactcctttgcctatgtgcttatttctacatttcttcttttattggtgtttctaaacttacattcaacagctggaatgtgaagaggacaaaaagaaagaggggaaaaaatatgagttaaattgttggtagcataagatgcttggcaaagtagggaagagtcctcctcgcttcttaatgagtttttacataaaaggcccaggaactgagccaaacctacagtgttcctgaataacataagcaacttggaaaagatttcactaagtgaagcaggagtgctctaaagccctgggctataggcagaagcctatgggggtttatactgctgaactgtctcaacagtttctttcttaaacttgacttccactggagacagtgtcttaggcatggtagtgaaatacagtggtgactggagcaagccaggtggtactatctatgttcaagacaaacttgtttgctccttagaggtcttctggggaactgcaggtagggggatgagaggggaaagctgcaaaaatgatgcttgctattattttgccacctgacaatggtttacccaaaggtggaatagacatagtctctacctcaattctgtgtcatcatttttgcctgaaggtttcaaaatagcttccagtctttcccatgtctggtctgtcttttattttgctgtcagatctttccaagttatgaatgagattagtgcctggtgataatagaccctcaaatatctgctgagtaaatgaagtttcttcctatgattaaaaccctcctatggcttctactttcttatactgtagagtttcaattccttaacatggtgtctgagacttcaagtcttcatgcatcctcttcttttctaggttcttatcacatgctcctctttgtgattccctaactttgagctgttctggtatgtttcaaagcatttacatgtgctagttcctctgggtctcatgccttcattcctactctgtcttgaaagtttctgttccttctcagtcctgctcctcaatgaaatcttcctcggtggtatccagacagattgagctggtcccattataggagtttcaatgaaactagtaaaatgtattctgctttcaagtacattataaatggttgtttacatgtttgtctctcttgttaaatgatgtctttttagggaagagctctcagcttgactgtctatgtcaaagtatggatcatgtggaacaaataaaagcaatgggggtaggcaaacctagatgagacttcgggcttcccctgcccagtgtgcgaccttagtaaaagtaattaatttctcagaaattcagttttctcctttaaaaaaatgttacttcggatgggtcagcaattgacaaataaaatttttatttctgaataaaataaagtgttaaagaagtaaatgacaaaaaaaaatgtggggtgtatgtgtaattgccagatttccaaataattattttaatacttaatgatttttggactctgttatcaaagctctttttgtcccgttacaaacacagcattgacaaagtatgttcgagtcataggcttttgaattacctgtgattctttgtgaaaataaaagactaagactcatgtgacttcctattcaaagaagtcacaattatatagtagcatcaaataagtgaatacactgagatagtaacataggtatgaaattaaccaatcaaagccaaaatatagagctatatttagttcagaagttagaatttcagatctacaggtttgtgcctggtctacaaggaaacaaataatttaaaaatcatctagttcccaggtattcttatttattccaagccatcctgctatatttgtgtttgcttctttaattcttaagtgtaaaagtgaggataattggagggaaactaagatgagtgatgtattattaccaaagatttaaaatttagaattgcacaaaaacccgtggacttccaaaaccattcccaaagaagaacgtgttgccaggctcatgaaaaaggatttttcagtttgagttcagtatctaatatctctttgttgtaaagaaattgtaaattaattgtattctgaatgttaagttttaaaggcataactaaatctaatgtaaaatttaggctcataaaattctttacttttaaagagtagaattttcttttacttttatgaacacagagaaaaaagaataaaacaaaagttgccattttaaaaaacacctccacaatttggaatttggttgttctcaaaggataaaacttctgccaaatggatgacaagctgttatcaggcataataggaggcttctgtgggagtaggcgatggattaatgcacagaagttgcatcacattttgagctcagatactctttgaaacagaaagagtctaaatttcaaagcttgtactaatctttcttaataactctagcacttattcatagatgtccaatataaatgtgtattaaccctagaaataaaaacatcaactttctaaagaaatattattttcaatgtcttcttacctcatcacgttcttggaaatctaaatgactcaatatgtcaaagaatgctagtgaaaaataaaaccatccttttttttttctttttttgagacagggtctcactatgtcaccctggctggagtgcaatgatgccatcatacctcactgtaacctcaaactcctgggctcaagcaattctgttgcctcagccctctgagtagctaggactacaggcatgcaccaccacatttggctaatttttttaatctttttgtagaagcagggtcctgctaggttgtccagaccagtcttgaactcctggcctcaagcaatcttcctgcctcggtttcccaaagtgctgggataacacaggcatgagccaccatgttcagccaaatccacacttataggttaataaaatatgaattcacaattaagatagaaggaaaactagtaatcaagatttattgagtatactgtgcccaaagagtataggttctttagcatacttttattattgactacttacagcatctactaagtatgttttattattctcatttttaaattagatactgaaatgtcaagagattctgatttattgaggatcatatagctggtttgttatgcagacaaaactcaaaaccagggtttttgtggatttttttaaggccctgcttatccaaaagttgtgccatttttaattttttcctagtgttacaaaatttttcccacatataaacaacataggagcagttaaattgaacagacagttctcacaatataggagacataaatcacttcctgggatgagatattataaacttatctaagcatcaacattttttggaaagacgccaacatcattgtacaagggagttccctgaaatgagccaaacaaaacccttgaaaacagaatcctatgaaccattcatttgatatcctctggggaagtaaataaagaatcctcatcccacatggtcatgcaccctgccggccatcccatctttgggaagggtcagactgcattcctgggatgtttgaggtcattatgagacgttggtttttgttcccatccacacccattatgaaggaaaatagtgttcaaattcagttcaaacagtgttcaaaaactaaccctttacaacacagagctccatctattcttgagcttgaaaatagtcttccaggtaatttcatagcaatagcttgattcctaaagagtgcaggaaactcatcttactttatttttaatattgaggaattatcatttgctgccctcaatagctaggtaaaatagctaagaaattaggagtgaggcattttccttctaatctgagagagaagatatgccgtggatacaaaagatgatcactgcaaggagcacatacttatgtaactcaggttgactcataatatgtcattttgctttgttgggattagtgtatagaaagttaagcgacactattccatgtactttgttaatcggggatagtaagtgaaatatcacattctacctgtttatctccttaaacatattcctatttcatattcaaagggacatggtaagagaactaaaccatggtcaacatttgcagtaggaagaataggtacttttagctttagactctcaaaacatataacatttaaatgaatcttgttaagatttcatttaactgatgctcaccatcaggtaatatagaagtcagcagaagaaaagcttccagaaatgcctggaagagacattaacctctaattcaacagtagtttttgctccaataaaacaataatcttcatttttctctttttgttttttgtttgtttgtttgagacagagtcttactctgtcacccaggctggagtgcagtggcgtgatctcagctcactgcaacctctgcctctagggttcaagcgattgattctccttcctcagcctcctgagtagctggaaatacaggagtgtgccaccacgcctggctaatttttgtgtttttagtagagacagggtttcaccatgttggccaggctagtcttgaactcctgacctcaggtgatccacctgcctcagcctttcaaagtgctgggattacaggcttgagccaccgcacccagcctcatcttcatcttagggtccaagagttcaaacaagtctgcaatgcatccaactgacgaaggtgaactttccagagaagaggcatttctttcttcctttcttttttttcttttttgagatggagccttgctctgtccccaggctggagtgcagtggcatgatctcggctcactgcaacctcaacctcctgggttcaagcgattctcctgcctcagcctcccaagtagctgggaccacaggtgcacgccaccacgcccggctaatttttgtatttttagtagagacggggtttcaccatgttggccaggatagtctccatctcttgaccttgtgatccacccacctcggcctcctaagtcgctgagattacaggctttcacaacatgcttcccgacacgcatgatctgctcagggaaggtcagagaatcctttccatacttgccctttctcgaattccttaaatttaaaaaactcaagatgacaaactgtcgtattttagggtgtattgtgttctaaatcccatcacctatttgatcaccttttaagggaacacttcaccagcaagaattctctgaattaaaagatgtcagaaaattctcttcatatcacagtgaatttaggaaaacaggtattcttcgtcccttgtctcaattttattcatattaatagagatctttcaaataaaaactatgaataaacatttaatatgccatttttctaagcctctaagacttcagtttgacccatttagggtcagtgtgaatccaggtgaccatatggaggcaccgtcaggccacagcccgctgtccgtccatcagaagtgtactgggagggaggttgtctttcagagatctagcatgtctggttactgagagcagaaattagtcatcttctgaatcaaagtaacttaagttggatataggaagtaattttcacattaatatacaatagtttatctacaggaggctattcttcatagaaatttcagctccctgatcatacagcactcattatagactctgcgggatgattgtcattaaagcagatatgtccttgactttgtcatagggtcttgaagctcatttctgtcttttgctacaggtcctggagcctctgggctttgtacaagacagagagctttatataaattaaacaagtccaaagatgtctcgtgcatattctagatggttatatagtaaacttcaccttaacaagggctctatcccagtgcttcagaaaaagaatttgatcacacaatggaaattcagacggtcccatatctggtgagtaatcctagctcattacctagcactccgtctctactttatccctctttagtttttacttcttgtggtaatttccaggaggagtaaaaaattgttgatgtttgtgaaatacggccctcaatagaaagttcaaacttgaatacaatgtagaataaatgatgactacataagagtcaaaaatcatcttaactgctaagactctacttgacagtcattcacagtataaaatagataaaatctttgtcttagtccattcaggctgctggctataacaaaatgccatagacaaagtagcttataaacaataggaattcatttttcatggttctggagtccaggaagtccaaggttgaagctctggcaggtttggtgtctagtgagggtcccctttcttgtttatagatggcgtcttctcactgtgtctcacatggtggcaagggttaagagaactccctgggtcctattgcgtaaggtcattaatcccattcacaagggctccacacccatgacctaatcacctcccaaaagaccccaccccctaataccatcacctgggggtcaggacttcaacatatgaattttggagagacagatactcagaccatagcaatcttcttatctcatttgcatgcctgtctgagaccaaaatgaagtgttttcaaagagtatcttctctgttgtttatattctacttcttccaggtgacctttcccttattctaacaccttgtttctatgttcctgatctgatgttctcaaaattactaccttgcttttggctacctataccaatttagaccataaagcatttgttgctactaaggtttttcttgtgcatcttatctgccagtctcccaacatggtctactgcctgccttccttgccacagttgtctgtggccttccaagatgacattgaattgattcgatgagttcttgagaatatagactaggatttttgaggcctccatttccattttcttctcaccaatagcgtgccactggacaggttacctaaaaacccttcaactcacttagttcagtcatggaatagagaaaagtatcttcatagatggttaggaggggcacgtgtaaaaaggctttgtctgctcacaaatgagaagttttgatttaagacaacagcagaagtctattactctaagagtaatagtgaaaatgacacccttcctatttactctgggaaaaagttatgggcagtagggggtggtaccaattgtttactaaaatctgagagaaagcattcttcaggaaaaggggacttgattgtcttttcaaattaaacagagaattcatccatcaatgtttcgtaccttcccagctagcaaatttctttcttggtataaatgtattaggaaagataattgccaatttacaaaaagaaatgatagttcttaaagagatattgcatatgcttgggcataacttaatgaaccattcttctgaatcagttacattcacacagtactaatcaaaccccagccaaattactttgattttactttctccaaaatctattttgggtagaaagttaatttatatctatctcatgaacctcaaatttagtcttcttgtatattttaattagataaatactttattcatatcccctctcttcttcccacaacctccctttttattcctcccattttcattaatatggctttccttccaaaagggtttgatgtttccatatgttcattagcatcttgtccagaagaaagaacaagacatggaggaagagtctttatttgtgagcttgctgttctctcttgaatacgcaaagctctttctactgatatatttgggaagaaaaatattctaggtataaaggagaatctgagcacagttatgttctttggttggtagatctcatttgcaagaggtttttactggactcagattagagccttcagatggaataattcaagggtagaatttcaaagcagatactacccccaattttatgcaactaaaggtgtcattttggagattcctattttttgtggaccagaaacccagtttattgattcaatcaatgataggtgctgtggaagttttcagatgttttcagatgtccttcagagaggtttatggatttaaaacaatatcagataaactaagttctggatgatatttaaaaaaatgccaggagtcctgtgataacctattcttctcagtatgtttcttatgtcaattgctttttatttcagacaaaacccaagtttttctatttgttttttatatgccaatatgtaagataatatgatgataataatagctcccactttttgaatgcctactgtgtgtcagatgctaagtgcttgcctctttttacttttatatcaacttgacaagttttatagatgggaaatctaaagatcaaagaggttaaataacttgtctaagatctcagaagtcataaaaaatggaaatgaaatttgaacccatgcccgaatccaaattccttgtttcttcctctataccagactatttccatattatgtttcttactgtgtgatgaaagccaatgtataaaataccaacgtcaacagttttccaaatatgtcacttattttagcaaacagttatttgtcagagtcagctagtgtattagtctgttctcaagctgctaataaaaacatacctgagactgggtaatttataaagaaaagatgtttaattgagccacagtttcacatggctagggaggcctcaggaaacttacaatcatggcagagggagaagcaaacacatccttcttcacatggtggcaggagagagaatgagagccaagtgaagggggaagccccttataaaaccatcactcactatcaggagaacagtatgagggaaaccgccccgatgattcaattatctccacctggtctctgcctcgacacatggggattatgacaattcaagatgaaattctaggtggggacatagccaagccatatcagctaacttcactgaccttttgtatatatatatatggtcaaatggaaggtgtttcacccactcacctgttatcccattccccgctcccaccttccactgatgggtgaagcaaatcctgatgttggttaaaaaggccaaaaacttaggcaaagctttctataattaactctcatttattcattctgtgacatgtctttgagccacaagacaattctcccctttctgaaggagtaaaccttttcagtttactattaatttaatattttttaaaatatttgcatgccacatgcttgatatctatccaagcataaatcattagatattttgtaaaagatattggcatcttcttctttccattccattagtggcattgataaataatgtttgctattgatagagtcaaaggaaatatttcaggaaggagcaacacttgtaaacacaatcgtctatctggaatgctcatgataaccacaggaattgtaatattgcatgtttccaaactaaaatatccagagagcttttctacctttctcgcttcatttcccacctcgtcataaattttcaactaatattggggaaattagtcacaaatcccaaattagtatttgtaattatcatcaaaatagtaagataatagggaaatcgcatcagtttccagacagccagaagattttttaaccactaatttactgaatatttaacatgccaagcttagtgacagaattggagctgcaaatatatatgattaaagaagaactaaataaattaacatattttgaaagatttgggaagtgataaataatcggtgatacataattgaacagtatgcagacattaaaactgatggtttcaaagacatgaaataatgaaaggaagcagaaggcactcatatgtatagtaggattactgaatcatcaaataaaaagagaaaaacagctagatcctagaaaaacttgcaatgagtaaagccaaaattatactaatttttaataagtaatagaattataggtgattttatttctcttccttacatgtagcagctttctaaaaacattgcaaatagaggatggttgaacttctggaggaatggacagaatgctagacaagaggatgagataaatgccctaaccttgcctaaggaatttagcaagacatcacaacacagttgagctaaaatgtaaggataggtttgtcaggcaagttgtggcaaggagggcattccagacacggaaaaatgaaagcacctggtaatttccatggcaatggcagcgtgtcctgtacttggcctaagcatatcaagactgaaatatctgaagcattattagctcataatcacagtaagtttcttcacaagggggccttaaataagcaaataggaattgatgtgagagcaaaaagaactgcttgagatggtacaacaatatgtgaaattgatttcaagtaattttgacaataccattatgcttcaatgctataattgcctattgcccacctaatgggacattcttaggttatttgtccttcatcctatgcaacttgcagtgattgtaatgaaagatggccataaggtaaggatgaagagagatgtcaggctcgtgatactctgcccttcagtcaataatgctagcagaggctctttaatgagaaggggagtgacagactcaggtttatttctataagaaaataatttagctgggcgtggtggcccacccctgtaattccaacactgtgggaggctgaggtgggtagatcactttagtccaggagttcaacaccagcctgagcaatatggcaagaccctgtttctacaaaaaatacaaatgattagctggacatagtggtgtgcgtcctgagtagccctagctactcaggaagttgtggtgggaagatcacctgagcccaggaggtcgaggcttcagtgagccaggattgcaccactgcattccagcctgggcaacagagtgaaagtctgacacatacatgcacatgcatgcacacacacacacacacacacacgcacacacacacacacatgcacagaagaagaaaagaaggaaagaaggaagaaaagaaggaaggaagaaaggaaggaagggattcttgtagattcaggaggatcatctggaaggggagacaagctaggggcaggaaggacagagggagggctgttagaatggtttggggcaataagagaaaaagaagaggcaataattgttagaagttgccaagataaagtctcctttgttaaattactcactaactctacgaccttgggtaagcttctttgcctccatttctttacctgtaaattgagtcatcgaccttcttcaaaataccattgtgggaattaacacaggagaaagcattttataaggttttaaaccctacaaaatccaaaggctttatcagctctacttcattaatgttattagcagtaataatattagtattcctattgcaacatcctcacaaggcacacattttgaaaacataaccaaagacagacaagaaaatcaagtaagaatttctgcttatagtaagaacatttctaagaatatggtgtagcagttatatggatgtatttcataatgcaagatttcagtacttctctaaaataagatatgaagattacagctttcatttgaaaataagaagtaaaaatgaatcattggcttctatcacctactcttatggtattgggaaatcaccaaataaaatgtttattttcaaaaatgtatattttatctggctaacagtagtgttactacagcttgaatgggtggaatatttctcaaggatatttttttagttggggtttcttcttcatgatcctttgaataaaggagaggaatcttttgttgttttcatgagtttttttttgcaaaattctcatttcttttaaatccaatttaaagaaaaaatacttagactaaaattccttatgtttaatattaaatacaaataaaactaagaataaatattttaaatttgtaacataactacaaccatgaaaccaagtaaaattccaagaattatcaagcaaaaacaatttaaatattcaaattaataattcaatgtgatcaatgatactgagtttgatgacagaatgatatagccttcgatctggttttacgtttgatctgtttatgtatattttcacgaatcctactaatgtaagaattgcctcttacatttatatactatataaagcagaattgttaagacagttagctcagaataatcacaatttacccaacaagcagtcttcaagtgccaatctaagacgtgaaaaacgaaaaagactatttgtttgcttaacgtttcagttagcatcgtggctttgttgaaatcaacattaaataatttttattttattgattgctaaaattgaaagtagcaaatttctttattgcatatttagtgctcacttaccttggctgaattattgtaggtcagtattagaaacatctccataaagcagcatttgccacatgaatgtggtacagatgtactgattgactcaagacttatctatttcaactactcagaaaccttgattgtgcagtcacttggcatccactttgcacaaacattatcatcaccatagactcgggcgttgatgtgactgagagatccattataagactggcatctacacgatgcagaattcaaagaaagctattttggacactcaagatgctatctacagacctcaatctgagatcttgtcatcatctgaagcaaattctaatttgtgtttattgatgagaaaagcattccaaattacagttccctttaaaggaactataagatctataagacattataagatttttgtaagatctttataagatcttatagaaatttttaactataagatcaaaattacagctaagacaacagaaaaacaatatgattgagatttattgccttagaaaaaggaacacagttaattaacccagacttaacctgagtaagagctctggtgaacagacaatacgcaatttagagaatatagacaaaactgacatgttgatcagtctctaacaacgtttgcaatctaagcaggaaagaagctgaagtgaggttaaagtacaggtttaaaaagtatgcacatatatattttgttaactgtcctcatttgttcagagccaaacaggctgttagggagaaaactacaaaagaagggaaacacaaaagcacttatcttcaacagaaaataagtcaatccctgataattatttcgtgatttacacagaacaatgcaggcatatagatacatgttccctttaatgtcgggtcttcgcaaaagctatgtgtttatactgccacaaaagtgacggtagccatgccacattaatcacgttttgtttaccagctaaatcctaatggcctttgagaaatggctcagtaagagcaggctctccttagggccacctctaatcaagtgattagactgattgggaaaatggcatgacccatcaaataaacccttggtatcacgtgtttgttttttaatcactcattgccaacacgagattattatttttcaattgtacatttttccctatgattatgtctgtcaaggactaagatacatgacatttattcttctataaatttgttaccatgaatatgacatttactcttctgtgaatttgttatttctaagatatcgtgtcttaggtttgcttaaatcaatataaaaaacatcaactcttatgtctgaggtgattgttttcccagtatgtcttttaattttacttgtagttttttgagtgatttttggtagtaataactttttgttttgtgttagaaagttatctgaatccaaatacctacacacacacacacacacacacacacacacacacacacagagagagagagagagagagagacagagagagagagagacagagagagagaaaccgtttttataactattctaaagcttttttttaactttgtattttaaagtgtttttttttttaactttaacttttcaattcatctgaattttccattgagagaggtgcagatccacactgttttaacatctctctcttctaccttggaacatcttgacctccaagtctactatcaaatgcattgtttccacaagagctcacaattagctcctggcttatttcagctgataatgatgtcaactttttgagctttcatttttttaacaggatattagaaaaccaaaatcctttcagacctaaaagactgggcatttaacaaggaatgtatttagattacaaaagataattaaatatctccatatttttggaatggagcgtctacctagaaatcctaaaatcttactggctagatctcagccaacttgtaaacaagtgattttttttttctcacatggactttctgaaaatacatattttaaaatctcctacatataaaatgttagcatatttggagcctactcacaatcttaactgatgtcaaacattagatatttgtaaatgtcaaaggccctataggtggcccaccgaagtagaaagtggggcaacctgttttgcttgttttaatgcattcttgaaatccaccactttggttaagatctatagatagcctgttggttggaagtactgggttatttctagtttcctcaccgtgtgtgtgtgtgtgtgtgtgtgtgtgtgtgtgtgtgtgtgtgtgtgatgaggaagctatccagctttattcattggatcaggtatttgattctggtctgtttacttataaccaaagcactacgcagtaaacttaaactatcacaggatctttgaatttgactcttcctgaaaatctggagtttttacagcggggtagagtttcagaatatttccattcatctcttatatgtaaataacacacgactagaaactgaagtgactatagaacaaattaatttgaatactatccagccttggaggaaaatttctagatatttgtatgtagtaggtctaagaagtatgaataatggcaatgagaaaaacctttcaggccgagcacagtggctcacacctgtaatcccagcagtttgggaggctgaggcaggcagatcacttgagctcaggaattcaagaccagtctgaccaacgtggtgaaaccccatctttactaaaaatacaaaaactagccaggcgtggtggcacacgactataatcccagctactcaggagtctgaggcaagagaatctcttgaaccctggaggtggaggttgcagtgagccaagatggcaccactgcactccagcctgggtgagagagtgagattctgtcttggaaaaaaaaaacaaaaaaaaacctttctgaatgttagttcttttacctaacttaatacttaagacttcagattaaacagtaattttatttgaaaatgcaggtagaaatcaaatggaaaaaaaattaccaaaataagaaaacctgtccatacttagatgaaactgtgcgccaattctgcagtatgcctgggtgacagagtacacaatcattatgcatttaaattcatctagtctgtatggaaaatcgccctgagtataactgactataactataaccttgaccaattcaactgaatgccattttgttaaataaaatatgagggcaacaagataaaaaaaaatagatacattggattgcatcaaaattttaaaaatcttttgtgcatgaaaggatattgtcaacaaaatgaaaggcaacccatgaacagaagaaaatatctgcaaatcatacatctgataaggggtaaatatccagaatatataaagaaaactcaacaatagcaaaaaaacaaacaacctgatttaaaaatggtcaaagatcttgaattaacatttctcgaaagaagatttacaactgggcaatagcacatggaaagatgttcaacatgtctaattattagggaaatgcaaatcaataccacagtgggataccattttacacctattaggatagttaatatttaaaaacagaaagtaacaagtgtttttaaggaaattggaacccttgtacatagctggtgggaatgtgaaaagaggcagacgctgtggaaaatggtacgatggttcctcaaaaattaaacatggaattaccatgtgatccattccacttctgtgtatgtacccaaaagaactgatagcatgaatggatatttgcacgttcatgttcatagcagcactattcacaacagccaaaacgtgaaagcaatctaagtgcccattgatagattactggatagacaaaatgtggtatttacatacaatgaaatagtatccagccttaaaaaggaaggaagttctggcatatgctataacatggatgaaccttggagacattatgctgagtgaataaatcatcataaaagtataaatactgtatgattccacttacatgagggacctagagtagtcaaattcatagagaaaaagtagaaaggtggtttccagaaactatggggagggttgaatggagagttactatttaatggatacagagtttcagttttgtaagattaaaaaaaaattctgaagatgggtggtggtaatagttgcacaaaattttaaaggtatccctgctactcaggaggctgaggtgggaggatcccttgagcccgggaattggaggctgcagtgagctgtgatggcaccactgcacttcagcctgggcaacagagtgagatcctgtttctaaaacagaaatatatatatattaaatgtactaatgccactatgcacttaaaaatggtgaaaatagtaaattttatatcatgcatcttttactgcaatttaaaaaataaataataaaataatataaagtaaaagaaatattagaggcttttaaatgcctgtgtttccatggagacctggttgttgatcttgatgactcatgtagaaaactgtttggcatacagtattcctgttttatagagtgaaatggtaacgtttgtgctatttctgctccttccaaaatataaatggattttacaattactcaggaattacaaattactgaaatcatctgagaaggcatctgtgagcaggtttgagtttcacggtctgaaaatgcctatcatagtcaactatctcatgactagtaattatagttttagtcttcaaaatgtttacttctacttcaaaacttttccatgcaatgtgggaatttcacacagtcatgaaatgtctttattacatgtttccaagagccttgttccatgcccaatatgatgattctcttaaaatcattataaacagatttttctcattaaaattacatattctttgtcacaaagactgaaatcaagcaaatatcgaagatgacccccagatatttgggtattgttaaaagcagaattagaacatggttatctttgtccattttctactaataataatgatagccactatttgttgtgtacttatgtgggtacatgcacatttatactgtctaacatttttattcctatatacaataatttatcaagtcagattatgagtatttcaacttacaggattcattctgtgatgatgttcacatgttcacagcctctggagtaaatttcctctgtatttaaaacccatctctatttccaggcaatcaaatagatcaaattagcacatgactctggagagaaaattatccatgaatgtggtgttcctggtaacagagagttttctgttactttgctcttaaaaaaaaaaatggaaaagtctctcgacttcttggtttgagagttgctagtgcagtgtacatgtataacaaaataaggtaaatgttctactctaaggaaggccaaaaagagctggaaatgtgtattatatgttcaaattaagaagtcaaggaagagggtgaataatccaatcattatgctgagtgaataaatcatcataaaatataaatactgtagtataaagtataaatccagaccaaatcaccagtttggtccgggtacttctcctttcttgttactctggggggtgagtctttgggtaattgttgctgttgtctaacatttctcattgccctttgacttcagaatgctatagagttgctgtctgtgtaacaagtctagtttaacattggaaatatgtgttcttcattttggttttatacaatctctgcaatcttatcactgatgcatatttttacaagaatgtaaatggctctgagcaatgttcaggatactcagagtgtcttgacacacatagaggtttttaagtacagagcattggtgatatgcacttggcatatcaaaaactcaggaaatcaccaaatgggattctcaaggacaattaccaatactgactccttcacctcccctgaaaacacctaactacttatggggtgtgtgttacttaaatgatgggaaaagaaacaatctagaagggagtcattaaagaagttgaatggtgaggaggaccttggcctagttgagatttacagaaacttacttctttgagatgagcttaaaatatagaaccccatgttgccacaatgctggcatgtctcatgggatcatagtctccttagccaagattggcctttgttttcacagaacagttatgactaccctagggggaagacaataatactggtaataaaactgattaaattatatgaacaaaagaaacctgctttagaaatatacttattttaacatgttttaaatggtatgcttcttgtaaaatattctaacattaagctttttgttttttcttcagtacacatccatagataccacaacaaaagttattacagtagggctgagtttccatgttttggagtttgtattattccattctcacactgctataaataaccacctgagactgggtaatctatgaggaaaagagaattaattgactcacagttccataggctgtacaggaagcatggctgggaggcctcaggaaacttacaattttggcagaagggtgaaggggaagcaagcatgtcttaacatggtggcaggagagagagctaagggggaagtgccacacacttttaaaccatcaaatctcataagaactcagtcactatcacgtgaacagcaagggggaaatccgagcccatgatccaatccccaagtctctctgccaacattgggaattacatttaacatgagatttgggtggagacacagagctaaaccatgtcacagttcttattcaattcagaatcatatggacctttaaaatccttaagcccaatttcacactcagtgtggaaatgccttctaaagcatactctacaaatgtgatggcaacttggcttgaatattcacaaagatagagcatgaaaacacatggtaaataagcaaaatgtatagtcattgtcagccgacatgttttttcttgttatactgatctatctgaggtagaggtccctgaattttagtcagatttatttcccatcctctggcttgcaaatgtctcaccaataagtccagtgtgtttgctgcttcttgttcactggatccaatcagcataatgtcatcaatgtaatggaccagtgtgatatctcgggaaagcaaaaagcgatcaagttctctctgaataaaattatgacacatagttggagaggtgatatacccctggggtaggacagtaatgatatattgctaaccttgcctgctgaaggcaaattgcttctgatgggccttatggacaggaaaggagaaaaaggtattttccaagtcaatgactgcatacgagcttccaggagatgtgttaatttgctcaagcaatgaaaccacatctggtacagcagctgcaattggagtcaccacttggataaacttatgataatccactgtcattctccaagactcatctgtcttctgcacaggctaaatgggatagttgaatggggatgtggtgggaatcaccacccctgcctctttcaagtccttgatggtggcaccaaactccacaatccctccggggatgcaatattgtttttaatttactatttttctaggtagagacagctctaatagcttccatttggcctttcccaccataataaccctcacactaccagtcagggagccaatgtgggggttctgccagacagctgctaagtatgtctatgccaattacacattctggcactggggaaatgaccacaggatgagtcccgggacccactgtaagtcggaactgagccaaaactccattaattacctgacctccataagcccctactttaactagaggaccacagtgatgcttgaggtcccctggaatcaacttcagctcagagccagtgtccagtagtccccgaaatgtctgatcatttccctttccccagcgcacagttaccctggtaaaaggccaaatgtctccctggggaaggatgggagaaagcttcactgcataaattgtcagtagtgtagtggggtccttcctcaagaggacccagcttccccttcattcaacgggttctgggtctgtaaactggctcaagtctggaaattgattgaggggccgtgattctctgtttttataattcaaattagtcttttgtccattaggcctagaatttttctgtttggataatttaagtagggatgcagtaggcttcttatgactttcacctctaggaacaccatgattaattagccaatgccagagctctaaatgagtcagactattctgattgccgctttgcctctgctatccattatggtagctacgcccaccttggctttgatggctgagtgctgccacttggcccctgccacctcgggatccaattattccctgtctatttaaattttttagttaagtgactgcagttcccactgttagacctgacatacagagaagagcaattacagggctcttcgaagatgcaggtgctgccttcacaaatctatttcacaaggtattagtcaagggtatatcttctggaccctcccagctgggatgtgtaggtctaaagtgactaatccactccaccatcccaatctccctaagcctttggatcccttccttgacattaaaccaagggagatcaggcatttccagctcatccacagtgggccatttttaacccatatttcatctaaccaagcaaactattagaaccttttttaactccctgagctgcaacattaaattcacagtctttacttagtgggcccaaatcattaatctcagcctgatgcaactctatgttccttccaccattatcccatacccttaacatccattcccatgactgttttccagattgctgtttatataaattagagaactcaaacagttcttttggagtgtagcgcacctcctcatgggtcacactctgaacctcccctctaggggcccatagggactttagtgtagttacaggtctaaaagcaaacagaggtgttgagggtggctctgaggagagtcaacattatcttgcctggcagctgcctccggggaggccatcactgttgcctcgggtagtgtggggtttatctcctcagacaaaggtggaaaggctgatggcagcccgggttgcggaggggatgttgccactactggggatggggaagttcttccttctggcaaaaaaggttcatcagagtttacagactcagtgtccccggctttatcagggtcctctcacaagatcccatttgaagttgcagagttccattcttttccaatcaatgccctcactttaacagtaggcacctggcgaggctgtgcgtgcatctttcattgcaggtcagccacttgcatgataagagcttgtgtctgtttttccacaatttcaactctttctctacaggacataagactctcactcagggcaatcttagcatacttgtggctcagtatctgcttctgaagccgggagacagaatccctgagttcaacattttctttcatcactttgtccactgaacaggagcaaccaaccagcttcattatgttctttggttctccacatatggccaaaggaattatgtataaagtcactaaaccccttgcctctcatgagcagtgaatcaggagtctcaaatgcatttattttgcataactctttaaacagttttcaacaaggactatcagttttctccatactattagaagtagagtccctggcatctttaggtctaatcatattaagcagccaatttcagaatccccaaaaccaatgaaagaacaacatccttaatattctgttcctctagaaccactcctggtaccgaaaactgtattagtcagggttctctaagagggatagaactaataggatatatatatatcctactaaataaacacacacatatatatatatatatgtttattaagtattaacttacacgatcacaaggtcccacaataggctgtctacaagctgttgagcgaggagagccagtctgaatcccaaaactgaagaacttggagtctgctcttcaaggccaagaagcatccagcacaggagaaagatgtaggctgggaagctaggctgtctcttgttttcacatttttctgcctgctttatattcactgccagctgattagtttgtgcccaccagattaagggtgggtctgccttccacagcccactgactcaaatgttaatctcttttggcaacactcacacagacacacccagaattaatgctttgtatccttcaatccaatcaagttgacactcagtattaaccatcacaagcatttaatataaacctaataagttatttctaacagctttattgagatataatttacataccataaaatttacccttttaaagtatacagttcagtggttttaataattcacaaagtggtacaaccatcatcacaatttagttttagaacattttcatcactccaacataaataattttttagttctttttgctttcacctttaggaattctgtatttctggataattataaaaggcactttattaatttggcaatgactgggtcaaatctaaaatgaagaaaaaaatgctgtaaagttagacagctatcataaaggagataataagtaattgttttatttgttgtctttaaacatgtaaaggcttctgggaagaatccttaaatattaatttttagtaatggaaattctggaaattaaaatatatcaaacatcaaatgttattaaaaattttaaatcaacaaaagtctgcatttgtaagtcaaatttctacctaagattacaaaggctttggttatagatccccttaaaaggatttggatgattctaagaagaaaacaaaattacttagatgtaatcctagcttttggctctgtcaatgcagaagacatttcatcatgtgattacacagcaatagggtgtttttatagtacctattcttatagaaaatgttctttgaagttctgtgcacactggtaaagacaggatagttgccatatttcagcacctaaccagaacaaaagatgtgcattcattttacattcacaagtcttattaatttttacaaatttgcatgacttattttaaatttgtactgcgtgagttggagaaattctcaatgatcaagttatctgagagcattagtcattctttaacatgattattgctgcactgggttaagtcgtatttgataattttcttctaaatgtgacttaatgggcttaccaaaccaacattaaaaaagcttttcaactatttagtcacttacattttctgctattaaaaaatgtttctgatttttgagtgtttgcctcccaaaaaacactttagaagttttttcagaaacacaacttaatgggttaatcctgctaccaaaacagactctcttgggattcacaggctgagaatccaaacttttaccaaacatgatttcttataaagacgtcttatagcttactgagagaaaccatttggggaacactgcaaaaatacagtgtagtagaatctggggagcaactttgttcagaattttgggctatggtatttcaggaatttaaaaaaaaacaaagcattagaataaaagtctaaatggactccctctttggccagggcactctaaaatgtaacctgaaagactggttcaggccatgatgagaagtggggttcagacatgcctcatcatacccttccagcagtaacatcaatgcctaccttaagtctgataagaaacatttacaattctctctaaagcctgctacttggaggcttcatctttaggataaaaccttggtgtcttcaacccctaatcatagcaaagacatctctttctactgataataactctttcaaccaattgccaatcagaatatatttatatctacctatgacctggaagccccctgcttcaagttgtcctgtcctttcagatcaaaccaatgtaaatcttacctgtattgacggatgtgttatgtctccgtacaatgtataaaaccaagcagtatcccgaccaccttgggcacatgtccacatgtcgtcaggacctcctgagacggtcataggcacctccttaaccttggcaaaataaactttctgaagtgtgtgagatctgtctcagatactttgggttcacaacagggaataaagagtacggcaggagcccatccagtaccctaaaatacttactttaaacatcagttttttccacaatgtttactagaaggctaggggcctagccttaatcctggtgcttgccatgtttgtcgttttggagggaatgttgtgcaacaccttactcacccaggaattgtacctgttgactcccttcaatgtttgaggcccagccagcactctgtctacaggagctaaacagcacagctggttcctctggcagcgtgactggaattctttctcagcttttatgttcacacagaaatgttatcttaatctcaactgacaagtgtgttcttaaaacaaaactcaaaggtagaaggctagaggaatgcttcagggagctccaaaatgaacaaaatgaatagatctgcacagcaattacatttagaaaccgaaacttttaatccacaatttagacagtagctgcaaaagacaatttgttcctttctgttttggagtgaagattataatacatcataatagtggtttttcacattaagtaatgtttttgcatttctgtaaaaagtgccttaatgccaaaacaaaaggaaaattagtcattagtggaaaaaaataaatccatagtagtggtaataagtcatttattcctccatccagcagttactgaacacctattgtatgccagatttttatctaggcaaagaaagagtgaaagataattctcataaaggccctaaaaacagggaatcttggggtattctgaaaaccttgaactagggcgcacttccgaacaaagaaggggtgtgagggaggacttctcagaggagctgaatacttgtaaatagataatatggagattttagaaattgaaattcgaaacattctaaagcagtgtcagaaaatgttctatgtaaatttagctgttattattatgttatgaaaatctttgtgtgtcctaagcatacataacataggcatacataagaaacagatttaaatccgtttcagataatccattgtccatcaagcataattattgatcttcacatggttcagacacaatgctgaaaattggaattaggaaagataatttttccaggagtccctgaggcaagcagtcttgtatcctaaagcttagcttgtttttatttatttatttatttatttatttatttatttatttattttgagacagagcctcactttgtcacccgggctggagtgcagtggtgtgaacatggctcactgcagcctcaacttcccaggctcaagcaatcctcccacctcaggcccccaagtagctgggactacaggcacgtgccactgtgcccaggtaatttttgtatcttttgtagatactgggtttcaccatgttgcccaggctggtctcaaactcctgggctcaagagacgcacccaccttggcctcccaaagtgctgggattacaggcatgagccacagcacctggcctgtttttaatttttaatcatcaaaattataggaagaataatttgttttattctctaaagtctctagaacatttttgttctcttcctccctccctctctccttccctccctccttctctcccttccttcctccttccctccctccgtccatccttccttccttccttccatccttccttccttccttccttccttccttccttccatccttctttccttccttccttccttccttccttctctctctttcactctttccttttcaatctcatgtctccaagaaaaacaaacttggcacaattattaggagtcactctttcatggtgagtataagtttcatgacatttcagaggaagtacagtcagccatttccgtggtgattgaggaggtttgaagattatggactaatacgcaggaagttatctatagattgcactggaaggaacctgaggaattagagctcagattgggaaggagataggttatgttttcagcacttttatgcgccttttatcctttcttataggaaggctgcagataataactaacaaatgactaataatactacctatgactgtttgattcccattctctgtaattctgtccttatgagactgccagagtgaggacaaattttaggccacagactgagagaaaacaataatcaataagaatttcaggtgtggcgagaagggaacatgccatggtcttcaaagcaatgatcagaacacattgtctttccagtttgggggtgggaagagaaaaaggagtaagactgtagcagaactgcttaaacagagctcaatattctacagagtcaacaagcacccctctcattcactacatacagatattaagaacgctgattaaaagtgggagagctactgcttaagtacaatatgtggaatgttgagctctgtttaagtgtttctgacagcatgcctctttttgacaaataccagttaaaatatgaaatacgagtttcttggaacagaacgcagaatctcttggggaactgagagaagccaagttgaccatttaataatcatcaggttcttttggcaaatattgagagctcccagcaattagaggtaggcaagtaggcgttggatggcaatcctctcccatgtaaccgtgctaccccatggtatgtcaataatgaaaacaagttatataacagattaagattgtctaaaatgtattaacaagaagcaaaaatagtcacatcaactgctcttgtaagcttagaatactaaggctgttcagacattctgaaagcaggataagccaaccttctagtttgggtcaagcaacattgtcatctctgaaatgaaagtgtgtggccaaatggagatgtgaacctaccatgctgctccagagatattagtttctgccggatttgcatatctttacatcgagttcatacatgggtgttggtgcctgtacactcattctatccagtcatgtaactcaagcacagctcattttactaatgtttgtatgctaattaaaaactcttaggtatagattcctataataatatttaaagttattatgtagctacttctgaagtgtgaatacctgagtagggtacttcagatgttcaatactcccttagaacagtgaatatagtaagcactcaaatgttacttactacttttcttgtacttatcttggttgtcatcttcattagtatgtgacatgctctgctatttctctacatgtctaacttactcactaagctagtgcttttcaagcccattagtgggttataaaatcaattcaacagtttctacatagcatttttaaatgaactaggccagaaaagaatagcaaatattaaagtgtatcaagtttttggttcaggcttataaaggtatatatactgagttacaacgtaaaatatgtttcctactgtggctcatggtcaaaaagaacaaacagaaaaatgctatactaggttgtatacttcaaagagatcttcccttatttatgttgctaaccccagtgtttagtatatgtttagctggtcagtaaatgtttgaatatgagtaacttgttttttctgctaagacgaatttcactgtaagatgagactggcatttaaaccttttggagaatctgaaaccaaatatgtgtaattgatatttgtagaaccaatgcatagaaatgttctctgttgctctgttttgaagaaaactgtaattatagacaatctctcctggaaatctttatagttttgtgtctcagtgttctgcattttaaaacccagaaattgcttattctggcgaaatgtattccagtgccctttgtatcagttgcctgttgttgctgtgcaaattgccacaagtgttgttgcttaaaacaacatgtttactatctcatagttttatgaactagacatctgacatgagtctcactggactatagtcaagagagccacagcctgctttcttctgaggttctagaggagattttccagcttctggatgcctctggaattccttggctcatgactcttctccatcttcaaagccagcggcgcagccctccgacctctgcctccatggtcacatctccccttctgactctgactctcctatcttcctctttgatttataaggaccctcctgattacactgggctcacaaagataatcccagataacctccccatttcaagttcttatttagccatatctgcaaattctcttttgccacttaatattcacaggttccaggaataaaacttagacatctttggaagccattattctgccttccatgcccatcaattctactgcctaagaagtgactcaaacagagaacatttgcaaagcattttggataacgttcatgctgcttgacttatagatgtggctatgcaggtcatttcctaaaaacctgttttctgatttcgtatgattttgggtgttcagcatgggccaagaaagtaacacctaaccatcagtgattttaaaatccttgcttttgagaatttgttgaaatttaggtagcaacccacattttcatactgaaatttgaaattgttctaacttttaacattacttagttaataaaccttagagtaatgaattagagaaatagaagtagaaggtacagaattctaaactagtgaagaacagtttgataatttatgaggatacataacttgcagaatgtgaaattttgggaaataatatggctgtccagggcaaagtcactgcagtttcctgagtaattaagaaatgtaatttggaagaactgctggcctgttggcaaagattttgaacactatctacgctggtttgttttataagtcaatgccttctaacgcttttattttcagtgactgtcattttaatttttttctccagttccctagtttctatgagaatttggtcttgctaataagattttctccaattatgaaatttgtcaacaacatagattcttgaaaagtaattataatcctttacttaaaatttttattgtttcctttaaaatgtcttctgcatagtaaaattcaaaatcaaatatctgtcaaagaggtgagtgtgccttattacctcaaagatgttaaattgcttttgcaaattactttctcattctcttttctagtctcatcttaattctccatggttttaatagcaggtgctcttgctggcttcatttggtttattgctttgtctaaaaatagttttcatagcttaaataggcttgcaaatttgattctttctaataatttcacttataagcagtcacattttctctctgaaaaataatttaatatttatattgccagttgggctaggtttggtttttaagttgtgcatttgtttccatttgaaactactattgttaataatcaacattggctgaggcaagatgtagtagacgccacccttaccaataaatattccttggactgttaacatgagtagttcattgaaagtatgtttgaatcaaaagaattaggttgtaaagtgagcggaggctgtggcttctgaaaaaaattggctatggacttagaaatcaaatcaaacctaggattaaatttggctctgctactgattagctaagatttggaacatgcacctcagttttgtcatgtgtacaattggaaaatacagacctcgtgagaatgatgtgaaaactatatgagataatgcagctaaatttctagcataggattcacaaaaagcatctaataaattgtacctcttattacctagacatttctagttttgctttaaaaaataaaatctgtggccagcgccgtggctcacacctgtaatcccagcactttgggaggctgaggcgggcagatcacttgaggtcaggagttcgagaccagcctggccaactttgtgaaaccccatctctactaaaaatacaaaaattagccaggcatggtgtcacacacctgtaaacacagcaactcgggaagctgaagctggagaatctcttgagcccggaaggtggaggttgcagtgagccaagatcacaccattcacaccactgcactccacctaggcaacagagccagattccatctcaaaacaaacaaacaaacaaaaaactgtgtatcttaacagatttttttaattgatatgtgctataaacagttcttaacacccacaaggaatacacaaaacatccaatagattacaaaaaatgttaaacttcaaaaattcttgatatgaaaatgaaatcaataaaaatttttaattgttagattaccaatttttttttttttgagacagagtctagctctgtcacccagactggagtgcagtggcacgatctcaggtcactgcaagctctgcctcccaggttcaagctattctcctgcctcagcctcccaagtagctgggactacagccgtgtgccaccacgcccagctatttttttgtattttagtagagacggggtttcaccatgttagccaggaaggtctcgatctcttgacctcgtgatccgcctgcctcggcctcccaaactgctgggattacaggcctgaaccactgcacctggcctagattagcaataatttctaacggaatatttttatcaacagactgtcattatagtgggggcaaagggctagattaaaggcattaggacaactaaccatctgtatataaaagaataaaactagtaccctacatcacaccattttcaaaaatcaattacagacacacaaaatacttaaatggaaaaaagctacaagactaacttaaaatattatatgtgtatatatatatatgtatacacacacgcatatgtactgaaaaaggtgaatagttaaataaataaattggaaaggaaaaacaaatattccttacagaggaattccatttaaaatatgcagattctcctccctcaaaggcgtggcacttaatcaccaccacatttctccttcttggtaggctagacataataacttgcttccaaggactagggtaaggagagagaaaatcagtaactttacagtgaaaaaatctggcaaggcgtgattaaccaagtaattaaggttaacatcgtcagtgatgtcatgtaggtatgatatcccccttgatattctgggatgagaagggcactttacccatgacatattctttccaaacacccataagctcactgtaatcataagaaaaacatcagataaatttagatccaagacaattctacagcttccttggccagtactcctcaagactgccaagatgatgaaaaacaaggaaaagaaagaaaagctgtcatagaccagaggagacgtgggagaaatgacaaagaaacacaatctggatccaggattgaatactggaaacaaagaaaagaaacctagtgaaattcaaataaaatctggagttcaattagcagtaatgtattaatgttggtttcttatcttggacaaatgtactatggtaatgtaagatgttaacaaaaggtgaaactgagaaagagaaacacagggactctgtattattgctgcaatctttctataaatccaaggttattcaaaagtacaaaatgtatttaagaagactataagatttaaaataaacatatcaacatatctttatattcttttttttttttgacggagtcttgctctgtcacccaggctggagtgcagtggcgtgatctcagctcactgcaagctcctcctcctgggttcatgccactctcctgcctcagcctcctgagtagctgggactacaggcgaccaccaccacgcccggctaatttttttgtatttttagtagagacagggtttcaccgtgtcagccaggaaggcctcgatctcctgatatcgtgatccacccgcctcagcctcccaaagtgctgggattacaggcacgagccaccgcgcctggccctttatattcttcagataaagatgtcttaaccaaggaaaaaaatgtagaaaaatattgatgaaaagaaaatattgataaatttgactacattaaattccagaatgttcatcaaaccaagctgcaaagaaagtaaaaatataaatcacaaatggggagaaggtatttgcaataaatacattgaaatgacagagatctcttgcaatgcaaattgaaaaaagataagcagctccatggaaaagtgaggaaaatacttaaatagaatttcagaaaaaaggcagtctcaaagatcaatgagtatattagaggatgttcaaccatattactgttgaggaaaagaccacagtgggatatcatttcatgtttgctcacttggaaattttaaagactgagaatatcaagtgttatcaaaagtgtggaaagccaaaacatttatacactgcaggtggaagtgtaagactttattgccactttggaaacaatttggcagtatctagagtaaaagatgtgtgtattctatgtatgacaaagcaactgcacttctaggtatatagcacagagaaactctcgtatatatgaaccaggaaaccaaaatactctcagaagctctgtttataataacaacaacaaaaagaaaaacaaaacagatgcaacccaaatatctatcacaacataataccatccagcaatgaaaataaaacaacagtaatgagcgaaacaaggatgaattgaaagaatacaatttggagggaaagaggaaagtgcagaatgcatacagcatttctttacatcaaattttaaaatatagaactaaacaatttagtgtttaggatcacaaacacgtgggaaagtgctatggtcttaatgtttgcattcctccaaaatgcatataattgaaatttcatccccaaaatgctgttacaaacaggtggcgcctttgggaggtgattaggtcatgaggatgaagccctcaagaatgcaattagtgtccttataaaagaggcctccaagagctcattggcccctttttgcccttctgccatgtgaggatatagcaaaaaggcaccatctttgaagaagacaggaagccctcaccagacatggaagctactggcaccttgatcttggacttcccaggctccagaactctgagcaataagtttctgctgtttacaaattacccagtttaacatattttgttatagcagcttgaacagactccaatagaaacctataaagaaaagcaaaggaatggtaaagataattcttacagctactacctctatggagggcttagaggagtggtgcctagggaacttcaaaaataaaacaatattctccgtttttaactggatggtgggttcatgggtgtttgtatacatactaaatatggtataaatatgattttatatctacttaataataataagaaagaaagacaaaggtgagagatagagacagggaaggagtgtgggttatcactctcactagcggtgatacccatacagcatggagaccccagtgtgcaaagggattcccaagtgtagagctaagtttaccagtttggtagatttcactgcctctttttattcttatctcatatcaaagcttcatttaagttagctgggcccaaattaccggagtaaaaacatcattatctcctccctctagctcaacctcttgtgatgtacagtgccccatgcctgttttctcggagccacagtcccctcttcctccttttctcactgtcacaacagagattctatatgtctccgtctacatacctgacccttaaatgctgtagtaagccatccttcctgagaattcatccccagatcctaggctgtctttttctccttccttaggatgtccttcctcctcactttgctcaagaccatgaattgatgcagtggtaatggaaaaatttctaaagcatatcggaccgatcattgccagaaatgcatcttctctcttttctgattcaaggcagttgttaggccagaagagtggcctcagagaaatacacacctctttttaaagtgatggattctgtattagatctgagaacttcttcttcactttgtatgccaaagaaaaaattttaagcaagtataaaagcagggagactgatgtactagtccagatgaaggaaggtagtctgaaccaaggcagtggatataacagaagtggaagtagagatgagggaacagatttgaaaaagatttgcttggaaccctgtttatttactagacaaaaatctgtctggaaggaattatgtgaaaatagccatcatcttcataaaacaacagtgggtggacagattaaaaactttaaaattattgtctacaatgagacaagaagaaagctaagtattttgagagttatagattattgaagcaaaattattaattgagcaccaagctctgccattgcctccaggaagctacagagaacattattacttgtaacctaatgagccttcagaaatcagtaactaatcatgttcatgacttgctatagttattagcattaaacatggattagactaatttttagtattatacatgggtgggatttgtctttttgaaaattttcaactattcacatttatcctttttgttccatagcaaaaaaagataaacaacatgttggaaagcatggatatggttcataatattttttgactgagcaattaattcttataatgacatttaaaggctttctgagaaaatatgagaaaacttttaagaaaaatgttttaagtataatatataaaggatgataaaagatctggagaaaggaaagtatcctgcttaagtcaacaactcctactgtagacagagtttttaataaaaaaaaagaattctgactataaaagatagtttaaccatgtagtttttatcttggagactgaggcagcatttaaaccacagaagaaagaaaccaggtaaatttattttatgactccgaattcataataaaaaaagagcacctcaatttcaggcatatattttgttttcccccaggataaacatattttcacaacataatttggcacattttacagccaaagtaaaatatgcaggaaaacactataatattaatgataactctacaaactgcatggagaaaacattactcaattatcagttaagtgaaattcaacctaagtgtggggttttaatccctcctacatgtaaatgtttatatgttgtatgtgtttaaggttcattagctcaaaatgtatcatacattccctaatgaaaagttatttcttatgggcctgtatatctttttggtttgtattgcaatttgtacaatgtcctgatgcacattttttattaatgttgtaattacattgtaaattttttttgtttgtttgcttttttctctcttcgaatgttagtgcattgaagacagaaactaccacttctataagatcgttttagttctttgcacagtgcacggtacatggtacttattcaataaatgtgtaatgaaaagctttacatgtatataatggccatgctcaggatatttaatttccctaaaaactgttagttctaactatgaagctagttaagtaatacaaactttctcatccttataaatgttttcttgggatctataattttgtataagctttccagtgaaaactttaattcatccctctaaaatattgtataaattctgtaaacaaaagaaaatttccaagtacctttcccccatgaaatataataccattaaatggctctgttatattttggagaggagctatctcatccaaaaataatagaaaatcatgagttttaacatttccgtaaaacagagcataaagaagtgtgaatcttctcttgttctcaggcgtgcatattctgctctgttcgttgctaagatacactaaacttaaaagtacagaaatgcaatttggctccttaaaaataggctatgcagctttcttatttttgacaaaattagtctctatggaacatacacaatctcagcacaatcatctattttagtcactttctggccttagttaattagatagtgttttgtaaagattttaattttaagttttcattttgagagcaacaaagttatttgcaagcactaaccaaatatctctggtttttggcttcccacccttcttttaagtgatctgtaaaaaaacaaccccgacatgggtttttgcaaggaaaagccacactgatctcaatttctaaaagtaactgattcttgtgttcttccatttcttcttctttttcctgaaaaagtaaagttacttcacaggccaaatctatttatcttgaggtgaggtggtggtgaaattgggtcgaataccatgttgcattctcagatcatgacaaatctggcagacgcatcttttctagttgagccagataagaactatgggcatctttataaggttcacatcattcctgttgggaagaccaacctcagaacctattacttgtttggtagtgtcagtatgttcaagctgaattacacatctgggcatatccctgggcaccagccttaaaatctgcttattttctataggatcctgcctttcaggggaaggcatgaaaaggtataattaggaaagaatacttgtatctatgtaaattttaaagatgcatatatatgcggatatatatgtgtgtatgtatgcatatacacatacatacaacaggttgcaagatccctggatctgaagatagcagacaagaatcaaaaatctctgccacgtattgcctactaattcataacccctaaattggattctattttttttagttctcacacgatttcacattccctttctttccttttacattaatggctttcttaattcttggtaggattttttttttccttctcatttttctcttctagcacctcttacccacagaattccatctttttctctcttctttcctcactacacagtctacatgaacttcttcactgtcacatttcaattaatgtccatacgtagtacttgataaatatctgtctccaacccatccctttttctttgacactccaaattcacatctctgaagctatgtcttcgaatgtaattgtcacaaaccaaattcatactctactactccatttctgctcttcctcctttctttcttatctatgattcttatggtaacagtgcaaaggctgggagaggaaaaatagaaatgtattaatgtaaagttgtcatactactcttgaagtgatataataccactttctgttagactccaatatgttgaaggtttatgctataagcactaaggtaaccaaaagatgctgcagactattatagcatctcttcaaacagacttcacagaaacttgcaagcagcctgtgtctatgacatcagttggcatgagcaacaggtttttgattttggagaactatgtttacctgacactgcaacaaaacaaaagcagctatacatgataggaatgaatacaaatattaacaactgataccattgaatttttggagggtgaggagcccctcaagacaaatagagactttcaattttaaaagagcagatattgtgtttgttcccctgacttatttcttaaaccagctaatcatttcatgagccgttatctattccttgctgtcttcttttgccctgctcaaactttcaccacccccagttgtttttcttcatgcacgtatactaaatttcagggctaaatggtttcattgttttggtaaagttgacatttcctttactacttctttttttttttgagacggagtctcgctctgtcgcccaggctggagtgcagtggtgcgatctgggctcactgcaagctctgcctcccgggttcacaccattctcccgcctcagcctcccgagtagctgggactacaggcacccgccacctcacccggctaattttttgtatttttagtagagacggggtttcaccgtgttagccaggatggtctcgatctcctgacctcgtgatccgcccgcctcggcctcccaaagtgctgggattacaggctcctttactacttcctatttgtattaaattattggttggcttaagaaaggagaaacaaggaagaaacaatatctatcattttaaaacttcaaggacctatttcttcaagaatttcaccacccaaaaaattaaagggtctctatcagaaatgtttttatttactcacagctattatgcttaatgttttagttttttctgaattcagcttactatgtttgaaaatcatcacctttaaagaaatctgacagtataattttgcaggtacaaggaaaagaaaaaaagccatcgattctgtagtttgttaaaactaaaacccattctccctttttctcttatcgccaatcaatctttcccatattctactgagcaaaatgactgttgccaaaatcagttctcaaaatccaaatatgaagcttctagaatgttataatgtaaaaataaagtatgctacattctggagtaaaaatttgaggacacacagacaaggacatacctgggttggctcaatcttgcttgtcctgtggtttcagaaatctaaattgattatttggatatctttttcgtgtattttaacgctgtgttgtgcccaccaaattaggttgctcaaatgtctgatccaagaggattatggaagcattctcgagtattttcatcttccgtgttcctctgggctttctctcttgaagtcattttattagtcatcctcaaatggcttctactgatgtttctgataacttgatgctgccctgggaatgcccatcacacagctgtcaccaccatctggagaactcattatctctatgaaatagtgttctcttacctatgggatatgacctttgctaattactctagtggagtaaaaaataatttccccatcatcattttatcctgctaccaggtcatgtggcagccacatgactccatcccatagtttcctgtaaaaagactggtaattcgacttttatttgatttactctttatcacagcttttacctcctaagaacttgggcaacagtccaaagtggaatggatcacaagtcaaactgagtatcagcacattatcacgtcctggctacagaaataaagatttgaattatttgtttttcccaccatcgggtgcccttagttaaagttaaccctcccttatactacatagaaataatctacattgtaagatcatctgcattaacaagtatatctttacatctcagataaaattgcatcttccttctctatggtagcacttactactgatgtatcattatatcttcgggctcatgtgcgacaaatgttttcagcagggcagaggatctactgatagttgttaagtgcttcctctgtgctggcactgcgctaaatactgcacatgtttaacgcacactgcactcacttaaccctcacaaaaatccaatgaagtaggtactaatactatcccattttgcagatgcacaaatggaagcaacgaggctaactagaacccactttgcaataagcggaggaagcagggtgagaacccaatcagtgcagcaacagagacttcactcttaactagtgcccaactgcttctcataataaaacatgtgctgctaaccacttcttagcctacatcatgttgacgaactttagattgattctaatctttgcttttatgaacagtattctagtgaatgtctttgtatgcacgtcattttgcacataagcatttatcaatagaataagtgtcctgaagtagaatttttgagtaaaaaaaagtatatatgtacattttacattttgatgagtattgctataatgttcttcataaaccatagtcagaatttatgttccaaaagccatatattagagtaaaaccatgtattttacaagtttcaagttacttttggagcatatctacatgttctttgcttttattcattctcaggttccctcctacaccaaattgatacaactatcccaggacttggtccgcaaagtgttttgttcaaatattcaaaatctaggcacaggtatttcttagtacttcataagatggggaaggatgaaaccatctgcataattggatattttccccattacaattggaatatttgaattcacagatgttaaatagggtaccactttatcactaggttttctggaaatcaaatattaactacacatgggaaaacccccagtttttgtttgtttgtttgttttgagacagagtcttgctctgttgcccaggctgcagtgcagtggtgcgatctcagctcactgcaacctcaacctcccaagttcaagccattctcctgcctcagcctacagagtagctggagctacaggcacgcaccaccaagcccagctaatttttgtatttttagtagaaagggggtttcaccatgttggccaggctggtatcaaactcctgacctcaagtgatccgcccgcgttggactcccaaagttctaggattacaggcatgagctaccgcacccagccaacccacagtttttctatagataaattgttaaatgtcgaaatatgttcaacataaacttaccacaaagaaagtggagatttaagaacaaactttaataaaactggggaaaactataatagaaaatttgtctcaaagtaaataattggcagttagtacattgaagattttttaatacaaacttttttatctcacaaaataaaatctaaatagaaaatttaccatagtatgattttttcacatgttaagataaaaattaaattgaagctagtgccaaaagggaaaaactagataagttatagtaaataactagaaaagtcatagtaaatgtttaaagagatgttgttatgttagttaaaataaattaattatataaatatagattttaaatcaattttgagtttcaaaatgagtcacatggattttataaataatgtagcttgcattacaacgacatatttacaatgttttcagttgagtgactaatatgaatcaggcaccttctcatgtgtctgttcatttaagaccaaagaacaacatcccattgaggtgggaattcttcatctcccttttacagacaaaactggagttcaggtgagcaaagtgacatatccatagtcacggacagacatagttagctatgccagatctcaagtcccacaaatctaagacagaagattcggttgtaattaacaagaagatatttctgaccgatttctgaatatcagttgaactaagaactccaaggaagtatctttggaaacactttaacctcaagttttaaatatttattaagtttctataataccatttggggtgttttgggtggtgttgtttttgacagagtctcactctctcgcccaggctggagtgcagtggcgccatctcggctcattgcaagctccgcctcccgggttcacgccattctcctgcctcagcctcccgagtagctgggactacaggcgcccaccaccacaccaggctgattttttgtatttttagtagagacggggtttcaccatgttagccaggatggtctcgatctcctgacctcatgatccgcccacctctgtctcccaaagtgctgagattacaggcgtgagccaccactcccggccctatttggtttttaattgtccaaaataaattggaagaaatacattgttctttgtgagttaattacttaacactttacactcccaagaactttcagaggttcaaatgccttcaagggcctcacaattctagggctaggctggaataaggatatcaaaagaaatagcttcagaggcatatgaaagaggcatgctcttgggaaggtatccaacttcagaaatatttacaaccttatgaacaagagataccaaatgtccagtctgggcctatggttttggcgttggtgtttcggctacttcaccaaaattaaacctgaatatttacagtatccagaaaaataatagcaataaaaatatgattgtaaattgaattctaaaaaccaaactcgttgtgaatcataacactctgcagaataaacaatattataaatgtatattttgttttggccttggttagaaagaaaacactaattttttagaaaactatatacatatttagatagaataggctaaaagtctatcctacacaaatttcaaatttaaatacactgctactcagaactaacaatatcagcctcattttatatctcaaaagggatgtgagctataaataaaagaagaatattatgttgcccacacagtgtcaattgcacttggcagagtttgctaccatctcttttcactgggagacttaacagagatataaagattttgcagtgtccatagttctgcaggtggttcctctcctctaaatctctgatctcatctacatagtagctttccaaagggagaatgaagttctgtcaattttaacacagaggataataaaacagctaagcccacttaaaaaatttttttccgtaggttattggggtacaggtgctatttggttacatgagtaagttcttcagtggtgatttgtgagattttggtgcacccatcacccaagtagtatacaccacaccctatttgtagtcttttatccctcacccccttccatccattccccccaagcccccaaagtccactgtgttattcttatgcctttgtgtcctcatagcttagctcccacatatcagtgagaacatatgatgtttggttttccattcctgagttacttcccttagaagaataatctccaatctcatccaggtcgctgcaaatgccctttattcattcctttttatggctaagtagtattccactgtatatatatgccacagtttatttatccactcgttgattgatgagcatttgggttgattctataattttgctattgcaaattgtgctgctataaacatgcatgtgcaagtatcttaaaaaacaacaacttcatgccgtattattgttcatttgacatcaagctctataacattctatactttctaaatgaagcaatgctgaataaattattcatttttgttggccaaaaaaatgttttcagattctagctaaaaatccaattcactagcactttaaaaacctgacagaggaaacccagacccctatttataattaagactgaagagtcacctgctactcaacatatccacacacaaactccttatctttgccccattaagccttttccttcatcataaattctttagaagttactgaaggtgcagtttaaataatcatccatgacatatgttgtgattgccctgattacaagatcttctacttctctctcttttgaaactttctagtatttgtctgcaatattcagatccttcattttatgataatcatttgtacatgtttaccaactctgatgtcattgtaaattccaaaaagatgggcggtattgtatttcttaactattttactaaggaaatagataaaaggatacttatgatgtgttcccagctatcaagaaaccaagaagtccagcttcttagtgttccacagagcaccttacatatctgtaaaatttgagttttttattaaaaaaatgggattcttagcccataacaatagctgtaaaaaaatgcagacagtgaaattttttaatttattggacttcatttgaagacatcattttttaaaacccaccaaaatgacagcataaaaaggagcaagggcaatgaattaatactgtgaattgtattaatatatttttagaaacaaaggataactgtagtaaataataacattgcaggttctgttttcttgatttgttttttgtttttaaaataactaagcaattaaaaggaacacattttaatattaataacattatttgtggttaagggatgcaaaaatgattacaaagaataaatcagatctagcatttgacagcacaacagggtgactatagtcaataataagttaattgtacctgaaataataactaaaagtataattgacttgtttgtaacacaaaggataaatgcttgaggtgatggatgccccgtttaccctgatgtgtttattacacattgtatgtctgtatcaaaatatctcatataccccaggaatatatgcaactactatgtacccacaaaaattaaaaattttaaaaatgacttaaatgtcaggagtagaagtgctctattctctccccttgagtgggaaagtctaatttgacattttaaaattaccgtttatttactgaaaataaaaataaaagttcaaactaaaaaaatagttagattaagtaaaatatttcatattaactaaaataggtacttaccaaataatgcaactgtatattacaatgtgcagttcatagtttttcactgttttaatatttaaatacaagtaaaactgtaagttgtcacaaagaatgatagaattgaagtaagtcaagttctgtttcttcgtgtttacaatgtgctgccattatttattttgatccactgtttaaatagaagaatatgtgttaccatggtagttagagagagaactgcacccaccagtgtgtgtgtgtgtgtgtgtgtgtgtgtgtgtgtgtgtgtgtttagggagaggcaaatctatccaaagaatattccaaagtaactttcatatagaatataacattcatcaaaggttaagtaataaaacattgccaatgggaagctcacatccatgttattaaaacccaacagttactacaacgatcttttagaatttagagatctttttctggcaggagtattttaccatggtattgcttagagtctgctgatgcctggtgataataaaaagcagactgactttagtgagttttattgctgttttcaaatctttccatacagggaatttcttgatcccagccccacccacactattccactgcctgaaacctgccatccttaactgagatcaggaatgttcaaagacctagcaacaggcctcatcaagttattttatggcagtgatcacagtggtgactgttaatcattggcagagttaccctttgcaaagtacacagaggcttctttttaaaccactttccagtttagcacactaaatgaggatgtttgtttggaatgttaccacaaacagatttaaatggttttcctatgatactatgaattttcttttaatgctcaaatgcatacaagttcttagctgtcaaattaacaagataattccttctcttttcacttgctgtagtaatagcagtataattaggagtgcagctccagaagagactgtttaactcctcagctcctcggtcaaagcttatttcttttccccagtttcacaaactatgagcagtggggtctcggacaaatttcccaacatttaaaatgcgtggtaaaatgattacagtagtacttgctttcatagagtggttgcagggattaaattagataatttgtgtagagtaggtctcacactatctgagatactgaatgacaaaacatgcaaaattgttcgctcctgctattattaaaatagaataatctgagaaaagaaaaatagctcagagcagtcagatatgtaaagtacgcaaactttatcaggcttggagagacatgagttcatacaagtcatccatgcccaggggacaaatgtttaaaggcatcttattcccagctagctgcttatgttcatgttcttggagtttgtgatacaaagaataatgtacagccaatcaatagcttatgttattttaatgtaaattcttggtaaacaacatagaagttgcctccttttcccccttaaaaacccacatgtaactgctgctaatcaaagtgtatattcagggcacttaattctgtgcctagtggccaccctcaagctttggctcagagaaactctgtacgtgatggtattttctgaatctgattatttgaggttgacatgataaatcaaaccaaagtatctgacctcccccaacctctcacctctccctaaatgctacattgctgctaccacaaagaggggtaaattgcagaatttttccgccattctttgctctcttagtttttaaaaatcttttaaatttaatctctcatatcttcatttgtcattccaaactggaaataattttgtgtggtgtcacagtataaaacattaaccattttgccaatgaaatattaccatttctagattttttaaaatctgacatctcaaccatttaagttttggggacccatttcaagttaaggactctattcatttaagaaaaatttttttaatgccaaggtagactagtaccaagttaaatctcaaaaactaaccatattctggtattataaggagctgcctgcaagaaaaatatttttctaatccaaaaactttcagaataagtggaatatgaacgtgaacatggcagtaagccaaaatttccatcaatgcataatgaaaccaaaggagatatcaaacccaaaattctttacttaggaaaaaaaaacgctcaacttgacaccaataaaaggttacaaccttttcaaaagcaaaaagcttttcaaaaagcccttcacaaagttatcaaatgagatactggattatttgaatatggtgacagagggaaacattttgatcggctgatcagctgaaaacaaactcattacactcccacctcaccaactagtttaaagtcaggaaaaaaaaaaggttattagcaactggaaactttttcacaaaaatatatgcctattgtcttggtgcggtggctcattcctgcaatcccagcactttgggaggctaaggcaggagggttgctggagcctaggagtttgagacaagcctgggcaacatagtaagacctggtccctacaaaaaaattgaaaaatttgccaggtgtggtggtgtgtgcctgtagtcccagctactcaggaggctgagcctgcaaggaggctgagcctgcaagatggaggctgcagtgagtcataattgtgccagtgaactccagcctgggtgacagagctgtcatatacatatatacatataatattatataattttataatatattaatatagatccataataatatagatctatattaaaacatcaatattaaaacaataatgtatattgactcagttgttatcaaattcaacttacatagtaccttataaatgttttatgaaagtaaataccagtctgtaaatattttttcctaaatttgtaaataaattgtattaaatctttagtacgtaggttttattggttaattctaataattctgcattaaagactggtattaaagcagtatttcagtatttttcaaatcaaacactcaagatacatgtatttcagtcactctattcatgttctcctagctcgctctggagaaaagaaaatatttaaaatatgtcttcagctcattttcacattcaactgatttcatccaacctctggctaagtaggaaatatgtgccagattaaagtttgatgatcagcaattttttttctatactaacatttttttctgcttacagaacactgttctatcattttcagtacatttcacagaggatcacataggcaaatttagatgtccttaatgttcacttatttctgcatacaaaagtcaatcagatatctagttaccttatgttccaaataaaaatatgttccaatatattgatgttgaaagaaagaagaaaggattacatggagcatttttgatgtcaccttgaagaaattgtcatacaccatctgctggtttattgagcatacataatagcaatgttgatgaattcttctttaataaatgatacatattgacataaccaccaaatatatcctaatgaccagaaacatatcaaggtgactagaaatggatccagcttaagttatccatgtgtattttgaatctgtgaagtgactaatactctaaataatctattttgtgctatgcttcatttataaagacttgtaagtgcgcctttcaatctagctcacaaaagaggttcatggtcttctttgtcttcattgtctctgtgggctgtcttctgagaattcttaccccattaagaatatacaggctgaagaggtcagtctactagcatgtcaaaaataatttagaaaccattctctctgttttatgccttgattgaccaacatgaacgtgttgggaaaattacacctatagcctataaatggaaattattccataaatcattgagatcaaagtcttcaataacttccaaacaaaaaagaaatgaaacatgacttattaagcagaaaagctgggagttcaaatatgggtaaagaggagggaggaagtttgctatataattaataagtaattaaaaataaaggagacttttatgaatcatgtgagagaaaatcatggaatacttcagaatcacaattttagaacttagcttatgaatggatccataaactgaaagactcaaatgaaaatggaaatactcagtcaatcattggatcactggtattgtggtatgctttacagttgacagtattagagtttggttcaggaactggaaatcacttaggtattttaagcaggaaagaaatcagatcaataattataaattgtgtaaaatccttggaagaactggagacctgaaggcagggctgggcctccaggtctgacctttgctagattcaggaagatggagaatcaaggatagctgatgaagctctagagtttaaagaaaaggaaaaaatgcttccactgctgtgccgcaaggattaaaaagcaactgccagagtaactccctcaggaatggagcacttaccccatgagaccagctgcctcctcaggacaatttcttcctgacacctttgaaacttacggatgagtttttctgctacgcacgaactctacttctcagctccgcctgctagcagaacacaacatcgagcaaccaagagatggtctctggctcctttctggattcctaagctctggcatccacattggcatccacaataagttcaaaaaattgaacttattttaaatacataatgatagatgaatgagagcctgggtatcgtagtttggtcttcaagcctttgcaatacagaaaggcccactttcagaaagccagcaagttggatatttgcaccagtcaaccacattcattattatttacaaagtcttttcatggtcacagtgctacatactcttcataaaaacaaattcgaatagatggtgttattcccattttacagaggaggaaatttacaggttgaagttgtaccatgtctaaaattacatatgaggccaggcctggtggctcctgcctataatcctaagccctttgggatgccagggtaagaggatcacttgaggccaggagtttgaaactagcccaggcaacatagtgaggcccccgtctctacaaaaaaatttttaaaaagaaattagctgggagtggtggtgtgtgccagcagtcctagctacttagaaagctgagatggaaggattgcttgagtccaggagtttgaggttacgaatctcttcatagactgctgtgattacatagttatgattgcaccactgcactcccgcctgggtaacagagtgagaccctatctctgaaataaaagtaaaataaaataacttgaaataaggtgctagaatcagtaacttaataacacaaatttgctttgaaatcctcctattactactacactgcttctacatgtatttgctaagtaaagccagtatgtttcttggttatcaaacatctaaaaagaaaacttcaggccaagtgcagtggctcacgcctgtaatctcaacactttgggaggctgagggaggaggattgcatgagcccaggagtttgagaccagcctgggcaatatagtgagacttcatctctaccaaaaaaaaaaaaaaaaaacaagcaaaaaaacttagccaatcatggtagcatgatcctgtagtcccagctacttgggaagctgaagtggaaggatcactcgagcccaggaggcagaggttgcagtaagctgagattgcaccacttcattccagcctgaacgacagagcaagactctttctcaaaaaaacaaaacaaaaaagaaacagatctatttagttaaaacgtaacaaaggaagacgattaccatggttgaatgttggtgtacccccataatttatatgttaatcctaacccccaatgtaatggtatttgaaggtagggcctttgggtgatgattaggtcatgagagtgacgcccttatgataaggatccgtgaccttataaaagggactccagagagctagttagttccttctgccatgtgaggacacatctagaagtaccagaaagtgggccctcgccagacactaaatttgctggaaccttaatcttagacttcccaacctccagaactgtgaggaatacatttctgttgtttacaagctactcagtttatggtactttgttattgtagcccaaatggactgagacaaccatccagtaaaaaacagcatctacctctataataaatataaaaagttatattctaaaatggaataacaatgggtttattgaatcaaagacattgattgcctaaaattcattacccaaagaggtagttgggtatcaaaattcctgatataggggaaatgttcactgtataatagctttaaatgacagaaattatggaatgctatacagtgttcttattatttgttaatttttaaaaagattcaacattaatgtttttcttggagacagggtttcgctctgttgtccaggatgcagtacagtagcatggtcgtggctcacagaaaccttgaactcctgggctcaatcaatcctcccacttcagcctcccaagtagctgggaccacaggggtgcattactatgcctagctaatctatttttgtaaaggcaggatctccctatattgccaggctggtcttgaactcctgggccactgtacagtattatcttagcttagaaaaaatatatgaagactacatcaaaattaaataggtaactctggatgatggcattttgagtgcctttatttttttcattactccatcttccaaactatcatatttgaattttttaaagcaataaatagtacccttaagaaaaagtaaaaacttttttaagagaattaaagcatttagaaataatagccaaagggcaagcatagatagaggtatggtaggtaggttatcaaaataaaaatagttgaagataaagtttttaaaagtgtgattcatattaagaaggaaaggagaaaatgttctcaaccgtctccgcatgttttttaagcaaaatcctaggactattaaagattcttgacacatacaggagagtcagattgtatttcaaatagatttattttctttttaaatcatgaaatatcacttatatttattagtttaaaaatccattttataaacacaaattctctgataattaataaaactaaagctatacatgagctatagacagtgtttgtcctcagtgaatatcttaattgactcattttgttgttgttgttttagcaacagtgtcttattctgtcacctaggctgcagtgcagtggggtgatcatagctaactgcaacctcaaactcctgggttcaaacactcctcccactctagcctctggaggaactgggactataggcacgcgccaccaggcccagctagtttttcaatttcctgtagaattgaggtcttgctctgttggccaggctgattcggaactcctggcatcaagcaatcgtctctcctcggccttccaaaatgctgggattacaggcataagccaccatgccaactggcttatttattcttaatcttaaatttattgagtatataatcattcaaacaattttaaaatcatattcactcttgaatttttaaaacatctgccacaggtgggagaaatgtaatccagcttctcattttccaaacccattgtaatttagcctctaaaataaaacccttaaaaatctgaacaagtaatcagtattgcttaactgaaaaatgattgtcatgattagttattgaataagtttcatttgtatttgtttggtattggtttcgctcactggatgagattatttagtaagcaaataaaactttgaaatttttacaactgttggtgaaatctctttatagattgtgaaacatctgtttaattctcatttggtggtataaggtactcaaagatgaatcagtaacaaggaattctttactcatgttttaacttctaacaaaacaaaattgtgtaaccatccaagaggaatctagaaatacttgttgaattaatatgtctatagatcaccaacattaatgatttctgtatagtctggttatgaggctaccctatgttttcatcatctggattttttctttctaacttcaaatattatttttgaaataaacctcagatgctaaagtgaataaaataaataaaataaaagtgaaaccctgtacatttgaagtacagaactttatcttaaatacatagaaatgatacctttgttttaatgccaataaactagaactagaataacacatttattttcttctggattttgaaacactacacacacacacacacacacacacacacaaatacacacacacatgcatataaataactctggctcagataatgtgatttttaaaagcatgccaatttggttgtgaattattacaccagtaagatataattagagaatcatttatttccttcataagtatactgacattaataacgctactcctcaaatgacctttcagacttcacctctggaccacagcccatcatgctttgcattgtgttattgatacactggtactaaattaaactcagatttaaggagctatcttgaagaaatcggcaaatactgtacgtgaatacaaacttgaatatccatggataatttatagcttcttacgtcaaatgttgatggaaagcatttgagaatagattgtggattaagcagggatgacatttcaagtggactgaatggggattagctgctactgttctggaatctcaggcctatggaatgctagcctgctagactgttccactcacacatactagctcaacaacagatctcgtagctatcggtgccactcatccccaatagccgatgcccttctagtggcatctccatctctgtttcccaattgctcactttttctccccaaaatatattccgatccttttcaaaaataattctgtattttcccaagcttagcggtctcctctctgacttctctattcagacattactgtattctatatgtctattcagaaatatattctctatttagacattagcccagacattcttggtaaatgatttgtagtctctattactactattagtgacagcattgaaaatctagttggccacagaaggcactcataccatagtcaacactgcatcagtactcacgtcatttattgtacttaactatctgggctcattttttgccatcactctccaccgccaacctcccccaagttatgaacagactgtatttgcaagtagtctttatgtatttagggaaagcaagcagatttgactattgcccaaaaaaagtactgtaatgctaatctactatgaaattatgtcatgaccaacacagagaatacagggattcctttattcattgttttggggaaaacctatatttgtttagaatcatgaaattttcatattgggaaagaagttgttccttatgtggtcataattaagagatgtcagtattaagggacccagacacagggatgttcatgtgaatttgaatcaggtaatgggcataggcagatgtatactaaataaagaatttaattttggttaacagtcactaagtacatcttccttaacttttccctcatttttttctcatttatttaaattgtcctatcttaaaaacccaaagtggcagctgggtgcagtggctcacgcctgtaatcccagcactttgggagactgaggcgggtggatcacctgaggtcaggagttcaagaccagcctgaccaacactgagaaaccttgtctctactaaaaacacaaaattagctgggcgtagtagcgcatgcctgtaatcccagctactcgggaggctgaggcaggagaatcgcttgaacccgggaggcggaggttgtgttgtgccgagatcatgccattgccattgcattccagcctgggcaacaagagcgaaactccatctcaaaaaaaaaaaaaacaaaaaaacaccaaagtggctagtgggatatgatcagggagtggtgagatgggagaagagagtggattttgacaggtttttgtggattatgagaagtggtagaagaattgaagcttctgctgtccctgtcagaccaaaggagtaggaggagttcctgctgtgaactgagaagctggtgatgttatctcaaacgcagccaagctctttccaaagtaagaatcagtaactgtttatataaagggcaggattgcccaactgcaatctgtttgtgagatgggtgttaaaatgctttggggcacctcccactactcctgattatagggaattaggttagcattgttgagggtaagggtttgaggacggtgcttgacacctacctccccacacctttcagaggtgtatatcagtaatacagaggaactgtcaaaaatacaagaaatcaactaaatcaattacgatcctgaagttgcattgttatgtgcttactaacagtgagaacattttgttggaaaaaatagtataaagtatactaacctaaaaatgctattaacactttgatccagagatgatacaaaaatattttacaactggtatggcataaacaatgacctattaaaatgagcacagaccagactgttgggaaaagggctctagaggtctgctgatacagggaaggggctgagatgaacaaggtgttaacatgtacttcactctttaacaactggcacagacgaaaccttgtgtatactacccgaatattagccctgccttttcctaatttgtgtatactacctgaatattaaccctgtggatgatattaccaatcccaccactcttggtctctaacagcctgatgttctgcctaatattgaaaaggacttgcttattcacaatggcacatgactttgcatctcttgctgtatacgttttttttttatttatttattttttgtttttctttttgagatggagtctcgccctgtcacccaggctggagtgcagtggcacaatcttggctcactacaacctccgcctcctgggttcaagtggttctcgtgcctcagctaccaagtagctgggattacaggcgcatgccaccacgcctggctaagttttgtacttttagtagagacggggttttgccatgtgcccaggctggtctcgaactcctgacctcaggtgatctgcccacctcggcctcccaaagttctgggattgcaggcatgagccaccatgcccggtcttgcatatatattttactgcacttcaatcatttagcattttaacattgacttgttatggtttctttaccagaaattttgattcatatgaaaataatgtcaaaacaaattctgttgtttttcacaaaaattctgagtttggctgccatattaatcaagggtaataatgtgtgaaatagtggaatatttcattgaatgttcggtcagcatacagctactgccactataaatttagataataataaaatctcatgtcgactgtgtatcaaaatttatcagtaaacggcaaatggttaaaacagccatgagtttttaaagagtattggtattaaaatttgcgattcttaggatgttttatatatgtcttattctacatatgtcaaacggttagatatgccttcttaagttcagctgggtatggtttttatgtgattacttcagctaatctactgttgaatgtagtgattgtggtaaaatcatacctaagaatttatcaacaaatagcggcaagtaacaagtaggtaaataactataggaattatgtttatatgccaatgcttagtaaatctttttgaagttaagctttgaattttacacattgctgtattaaacaactccaactattttgactttaaaaagtgcaaaaaattgtttataagaaattaatgccttcctaaatatttttatatgattgaaattgtaaagggtaaaagtataagtaatgcagaattatttctgagaactctaagaagaaatctaaatacaatagtaataagaaaacaaatggtctaagagccaagacaaaactctgtcacatctaaaatggaaatagtactctgaaataagaaagagtaactagaaatggaaagccccagttgcagtcagccgagatcacagccacaactacccaataagaagaaatgtaacatgggaaggatgtttctaatatcggtacttaggtcagctataatgcctggcttgcaaatcacagaaagtacaactcaaagtagcttaaaaatgagagtattgtattggcttatataactgcaaaacccaaagttaggccttgtttgaacggtgcttgagctacctgtgcaagcatatcaccaaggatacagtttctttgtctttccagaatgttttctgcagagctggtttcattctaaagatgactttttgtaatatcatgatgactacaaacatctctggaacacacacttcccagaatacatttgcaccatagaggagagtgtatgtgtcttagcattctcagcaaatgtctcaaaattaattatctttgcatgggctaatgctacatgcccacctgctgaaccacactttgtatccagggaggtagaattaaccgattaaagtagctttgatcacatactccatacctagaacttttttttttagcttccctggagccatatggatccaccgccatctccaccagaaaaatatctgctattaataccattgggaatagggaataggggctgggaagtcatccaacaaatgtcctcactagtagagaaatacaagaatattggggcaaattaaacacattacacaaatacaataattgatgtcctgatgaattttcctccaatcacgtctttcatattcctgggttactgcaaccgcttttaggttttttgctttttttttccccctggacagagaactctgtgccagctgctgggtgctgagcacttttttttttttttttttagtatttattgatcattcttgggtgtttctcagagagggggatgtggcagggtcataggataatagtggagggaaggtcagcagataaacacgagaacaaaggtctctggttttcctaggcagaggtacctgcggccttccgcagtgtttgtgtccctgggtacttgagattagggagtggtgatgactcttaaggagcatgctgccttcaagcatctgtttaacaaagcacatcttgcccagcccttaatccatttaaccctgagtggacacagcacatgtttcagagagcacggggttgggggtaaggttatagattaacagcatcccaaggcagaagaatttttcttagtacagaacaaaatggagtctcctatgtctacttctttctacacagacacagtaacaatctgatctctctttcttttccccacatttcccccttttcttttcgacaaaaccgccatcgtcatcatggcccgttctccatggtctctgtctcttcggagctgttgggtacacctcccagatggggcggccgggcagaggcctcctcacctcccagacggggcggccgggcagaggcctcctcacctcccggacggggcggccaggcagaggcgctgcaacggctttttgtaagggatacatagaaaataaaaatcatacagaacatgtaaacacaaaactcagcaatagcattcctatcatttgatgctaagacaaaatatatcactgccagttttttagtcatagacaattcataggaacttaatcattagatattaaatctgaatatgaagaggatgttcattgaccttataatgaaatatgtgaataaatacaaaatcaaagtaatatttaattaataactactctaccagaacagcatattttgtattagttatacgtactgatataaataggtagcatttccttgtactcattgttctgctgacaaaaattctattatgggagaaaaatggcaataaaaaacttatatttggataaaagttctgagaaatcttgaagacttttaagtggaatgcatttgaaattagaattctgaaagaaatatgaatttgtggtaaaattgtcaataaaaattaacacattttaaacagattaaagaacacagaatatgtctggactccatatgtgaaaataatatgacatagaaaattcaagtttttacttgaaagagggcttcatgagattaatctgagaacaagagtaaaatttttagaggtataatttagtataaatgaggaggacaaaatattttcacccatctttttggttttgttttgttttgttttttgagacggagtctcactctgtcacccaggttggagtgcagtggcacgatctcggctcactgcaagctccgcctcccgggttcacgccatgctcctgcctcagcctcccgagtggctgggactacaggcgcccaccatcacgcccagttaattttttttttgtatttttcgtagagacagggtttcaccatgttaacgagaatggtctcgatctcctgaccccgtgatccacccgcctcggcctcccaaagtgctgggattacaggcgtgagccaccgcgtctggcctgttttgtttttttgagacggagtttcactctgtcgcccaggctggagtgcagggctgtgatctcagctgactgcaatctccacctcctgggctcaagtgattctcctgtctcagcctcctgagtatcttggattacaggcgtgcacccccacccccggctagtttttgtatgttttgtagagacagggtttcgccgcgttggccaggctggcctttaaatcctgggctcaagtgatctgcctgcctcagcctcccaaagtgctgggattacaggcgtgaagcgctgtgtccggcctcacccatcttttctatacaaattataaatgaaataataggaataaagaaaaccatcttgtgaatcataaccatgccctctccgcttgtttaacaggcaaggagacaacttaaagagaccaaagaacaactgtgaatttgtttaaaatatgacggtagtagaaaacaaaaaatatttcagtttcagtgaaagagagtgtctttgtttttagctatgtgaaaaaatcactgagaacggttttagaagattaatagtaactttacttgcagaaaatataaatcattgctagatttgtgatggaccatctaacctgagtgacaaattcaaaggtagccactacatttcaggaagacccaagagttccatagacatataccatacttttaagatttagctatcatgatgcttcatgaaaataaaacaaaaccataaaatgttttcagtggtatcagttctttacctggttgaatactagcatctgcaagaagactaataattttccaaaacattttaagtgaaactaaatcaaaaactgcggccatctctactgttgaaaatatgtcaccctatatatcattatgcattacaaatgaacactctaagaacaaattaaattaaattcagaccttctttacttgttatacatacttctagctgatggtatctcaccagtgatattttatttcttctatattaaatgaaagatttcaacatatttttgaaaatataattaagttttatttaagtctgaaaaaatatttttttctcatttgaagcatccattgatgccttctcctgatatctagcccatttccctatcactaaagcatttatacatttacagaggagtgattatgtattatccatattacagatccctctggaggtatcagcataaaacaaataaaaattgagtcaatttctgcttagagtaaattaatctatgtcatatttcactcatgatcatttttattttctgttcaaaggtgctaatttagtcaattaattaaaggaacttttttctagcacacacatcaatatgctttatcaaatattggaagttttttttttctgtttacaactgtagtgagatttaaccagtgatattagaccctatttcactaaactgaatagaatcctttcaggaatcaagagtcttttagcacttatttgttctttagtttaactgtgaaaagaaaaataattcagcaggattcatcaaacaatgccaaattatgaattaagatacgaatgatgcattaagtttcttagtggacagatatagcacattgtaacagacaattttctgagaaatgtaatttatattcagagatccacaatccatagtgtataatatgcatgcatataaataaaacaaagttgatcaccaaattattaactactgagctctaatattttccttgcagttaactaaataaatgagatcttcatgggtctcttttgggatatctatactgtaacaagaagataggaaatttaagcttaaatcagttgtattaacaccaatagtgagtgaaaactttcaaggatttttttttacatgttgacatgaagaggagaaagtaaaatttaacattagttcattcaggttttatacttgttggtattttacagattgaatgtttatgtgtcccctccctaaaattcatgctttgaaacataactcccaatgtgatggtatttgtaggcagggcctttgaatgagtgtccttataaaagagatcccagagagatacctcaccccttctgccatgtgaggacacagtaagaagatggcactctaggaaccaggaagagggccctcaacagacaatgaatctgtaaccgtgatcttgggctttccagctccagaattgtgaaaaatgtatttctgttgtttgtaagccatccagtctatattattctattatggcagcccgaactgactaaggcaggtagtgtcttagtgtcctagggctcctataacaaagtaccagaaattagctcgtttaaaacaacagaaatctgttctctcacaggtcttgagactggcagcctgaaaccaaggagttggcaaggccatgctgcctctgaaactcctggggaggacacttccttccctcttacaaatctgggtaagctcaagtgtccctcagccaaaagatggcctaccaagagggtcatttgattagaaatgcatgttcacgaggggtcttcagcattgacttatctatctccaaaaggaatagcataaaatcacagaattgaaagaacctgtgtgtctcataacttgaaatttgtaaactacttaccagatcataccatctatagtgaactgtcgattaatagtttctataaattctgaagttaacttgtaaatagtaaattatattttcatcttgaaaggattaatctgtttaatgtgaacaggtaaggtagactagaattttattaactttttttaaaaaaaaccttgattttttaatataagtgtcaaaaataaaaagtggcctgtgcctcttcaaaattttaaaaaatacaagaacttagaaggtttttgtttctgagtctggtttattggagagtgtgtgataggtaacctctaggatgctatcacctatgaacctatgaaccctgcctcctggaattcacccattgtgtgtaatccctttccctggagtgtgagctggacttcttgacttgcttccaagaagagattaagatgaatgtgatgggatgttacttctaagattaagttttaagagactgtggcttccatactgtttgttctcttgtgctgtctcgtagatcatttgctctggacatgctcctggagaaactcatgtgattagggaagttagaaactgattccccatctagttgagccttcagatgagactgcagccccagtcaagagcctgactgcaatctaatgaaaaccttgagccatgcccaggatccctgatccacaaaaactgataataaatgtgtattgttttaagcctttgaaccactaaattgtggaggaatttgttatgcaaccacagatgactaataagggggaaggggaaaggccgaggattctattataatatagtgttaaggtcatgtgcttaggaatcagtttttccaataacttaaaaacattttattcaagtaatatattactttagctagatcaaaaatttcaaataccaaagatataaaaagagtaacatttaatctccaatctcctttaattctacatccctctcctgagttaatcaaacagttattttcccaaacattttctctgcatttacattttcatatatgattttttatttcacaggaatgacatggaatagtctacaaccattttttaaattaaccagtcctgaagaccttcccacagatgtacacagatgtctaattttattattttagctgctgctgaaatcaataacatatctataacacaattttatttaatctaccctgactattacacatttgggttatttctaatattttactctgaccaaaactgttgcaattaatagacttgtgcttatctttttgtgctcatgaactaggtgtttctaagacagacttgtagaggtagaatttcaaaggacatgacagtttttgatagaaagactcaaattatcctttttagcagaataacaattcacactgtcacagcagtgtactccaattctggttttcccacatctatgtcaatactagatttttaaaacagttttagaacacattccacccgcttcttccaccccgcagaagaatgacgtattttgcatttcttctgattttcataatttacttttgaaatggtttagatctttaaatcacctgggatgttttcagcaatgtttaattgacctatagattgagtttggagaagattataacactaacaagaaaataggtagtattttcaatggactctaaattaacccattgaatacaaacctgttgaattcctcatttccttctcatcagaatatcctgcagttcttctattacctagttgataatctgtaaagagtcatcaaattgaactgattaaattgcctggggggttttggtcatctgccattgaaaggtacagtgacttcctagaacccagatcttgatttctacatactattattcactaaaaaacaaatgaaaagccaaatgacaacaacagaaactgaggttccttagagaaacgactaaatcagcagcagggttggagaaagtatgagataagactggaacatcttgtgacagaaagtatggaagtggttacaggatgatggacacatgcgaaaacgacatgggagtgggcttgagagatctccacctggcccaattagaacaatttaggcatcgacctaaataatgatggtaacttattataatctactgaataaaataagaatccacaagtctatgatagaaataaatatgtggagaaaatagagagagaaaagtttcttagaatgccaactaataaacgtagacatgatgataggaaattaccattcagcaactgtcaaagcaatacctgatctcggcaagaatcatcaatgaatgctaaacctcgtgagtgaaagtaatatgaaaaatagattgtatcggtcagagttctcctgagacacagattcaacagaatctgttacatctctctatttatatttatataaaatataaaattatacatatagacatatattctattacacacacacacacacacacacacacacacacacacagatgtaatttaaggaattggtgcatatgattgtggcggctggcaagtcaggccagcaggctgaaaacaaaggcaaaatttctgtgttacaatctcaaggcagaattcttcctctccagaaaacttcaggttttgttcctaaagccttcagttaattgaatgatgcccaatcacattactgagagtaaccttctttatttaaagtgaactgattggaaacaatactcacacctacaaagtatgttcacagcaacatctagatttatatttgaccaaacaactaagcaccatagcctagccaagctgacatgtaaattaatcatcacagagatatttatgtaacctcaaaataattcactataaatgtattaatcataaagggagaaatactagctttatagacatcaagctattcatttgatcaaagttaacatcaaagttagtgggacaaatcctcacatgattctgaggttttcctatcaaaaaagcccaatattttctaagtataagggaacctatgacagacccaactgaagaatattctgtaaaataattggactatactcttataaaatgtcagggttatgaaagacgaacaagactgagaaagtgttcaatactaaacgagggaactggcacggtggctcacgcctgtaatctcagcactctggaaagctgaggcgggggcacatcatgaggtcaggagttcaagaccagcctggccaaaatggtgaaatcctgtctctactaaaaatacaaaaattagccaggtatggtggtgggcgcctgtaatcccagctactcgtgaggctgaggcaggagaattgcttaaacccgggaggcggaggttgcagtgagccgatatcacaccaccgcactagcctgggtgacagagaaaggctccatctcaaaaaaaaaaaaaaaaaagcaacacatggtcctggattggatatttgacagtgagggggcgccagaagctggaggagaaggctttaaagtacacaattcattgttaggacaattgacgaaattttgtaaaaataacatgtgttagataatagtatatctatattgatttttcttacctgaataattatagtctggttatttaagagtatatactttttcttaggaaatacacactggtatttacaggtcaagcagcaagatttctgcagccctctctgatggttccaaaaagttcataaatagattgataaacagacaggataataaagtaagtgagacaaaatgtatacattggtcaatcgaggtcaagaatatacaagagttattcacatgattcttgtaacttttcactaaactcaaaattatgacccaaaagagcaatgtttacaatgtgtttctcatcgtattggtaatttacatttttttggaagtggaaattttttttcaaatattttggctataggtctgtttcttagatacttagttcaacacaaaccccaccatttaattctctaaggaatttaggagctctctttcccacaattcaatttccaatagatactatgattactatgaaacctatgatttatagatttcaaagtgctgtacatcacaaaacagcatgggattaatttaaaagtgttcagaattaggagactaggctaatagtccagagccatgagtgcttatatttaagtattcaacaatataaatgagtacattactcacatgaatactaagattcttactgttgatgaactattttgtaatactattaaccatttttaattaaaattatcattgcgtatgttgagttttaacgtagaaagagaataagactccttcgggaggtagttttttttgttttgttttgttttttgaggcaggctttcactctgttgcccaggctagagtgcagcagcatggtcacagttcatatgagcctcgacaaccccgggctcaggtgattcttctgcctcagactcccaaatagctgggactacagatgtgtgctaccatgcccagctaaccttttaatttttgtagagatgatgtttcgccatgttgcccaggcttgtcttgaatccaggagataattattatatggatatacttaggaatatttttagtgatctaagtaaccagaaaaagaggatcccttattattctaccttctgactaggcttcactgaaaactctgcttgtttttatgcataacaaaactcagataataactggagagaaataacaattcattcttcacagtaattcatgcaatttagtaattaaaaatattagtttccatttttattcctggttcaaatgtggtaaatgcaaaccagaaaaattattagtccgatattgctaattaaaacattctgtgtctgtgagttacacttttagaaatcaaaaacagcaatggataaagaaagtatattttcagaaatgtagatttgttatttaaaaataaaaagcagaaattttgacaaaagatattcttgaagacgaactggccatactgttcaaaactgtgtggtcgtggttttgaatatgaatgcaatttcttatgtataaaaatagttatttcatgaagaattgtacttcagtggaaaatataattgagagattacaatttttaaaaaatcatttactgctattgaaggtactggtaagtttctttaatagttttacaaattccatcccacttagtactatggcaatataaaattctatctagcacataaattctaatttaataaatcaacaaagtattgttatgttttactgtggttactaacaaccttaaggtctgtggccatcaaggcaaaacagtctccaatcaaagcctggaatgaaggagttaaccatattatccatgtgatttttgtacactaaagaattaggttctctaatgtaaatatatatattatatatatatgtggttgttgacaaacattttggacaactgattagataacagagtgaaatgataactagaaagttattctgcaatctaagtactgtttgatagtacatattcttggagaatacattccaaacttagaatatttaggatattaaatcgtttccagttactttttcattctctgattagatcacaattttatcagtatatgaagtcgccacttgtttcactaaaatgagtgtcgtgatgaggcagcattatatttcttcattaacaacagtgtttgtgtttcagccgtgttttcagaaagttatgatagaatcattctgattcctttttaatgtcttggcctatttgtgaggaaaggcaaatataggaaacacggctgaatccaaactgctgtccgttaactgaacctatatttgaaataaaagtattactttagctataaccataatattctttcataaaatgacctaaagacaatggcagttgcctgatggagcagcttcctgtgtaagatgactgcctaactagaatttatgtgcagtatttaatgtgtggagttgcattttgaaaccaagaactttgctccccttccacggctactgctctgattcaagctactaccacttcctccctggacttacgcaatatcctgaatgatctccctacatcttctcttgctcaattagaattcatttttacatagtagcagagtaacattacattcctgttcaaaaccttcctgtgacttacaattgcacctaaaattgaaatgtacatgatccgaccacaacctccctctgctgctttggcccatctggccctctttctgtttttctgatagatacaccaatgtggattctgccttgggtcctctgcattcctggtctcctctgctcttctaccatctcttttccaggcgtgctccttcccatcatgcagctctcaacccaaaggtctccgttccagatctgccttctctgtaagtttctcaacacacctttgcattgtcttcataatatttaccactatctgtcattaccttgttagtttatgtgtcttttttcttcctaatgaaaataaaaactcagcgagtataaggatatttgttcctaggaggatgtctagtataaagggggaactcaataaatatttgttttataaaatgaatcttcaaaactggtatcatttttctgctgtaattgaaacgttattgtcctagtgttataaagtgtgtagatattattttcctttaagcatttacatgacacagattctgatcattgttggatttgcaaacaacacttaattgaaagaaggaagtggcaaacggttatgtcttgcttcattgcagtgaaataatatttattattctattgtttaaaacattgagcaggcagagtctgcttcctggaaataacatgagtcagattctaaccatgtgctgattgcatattctccattgtaatcataggatcagacacaaatgaaaactgtgcacaaacacctctctgggcacttgagcattggacagtcaacaggagcccttcactagattcagcttcttaaggttcagcttcctacctagctctaaatctataccctcagcacctggcatagtacatggtgatggatataagatgaacaaataatataggtgaaaattgatcaacctactattatcagtcatcaataaatgagaaaggttggctctaaaactttatttccaagccaggcatttttctatgagaaaataagttcctgattctaatgttagctgtctaagttagctcatttaaaagcaaattttacattcatttttcatcaatatttattaagttttttctgtgctaggcaatatggatacaacggtagaaaaaccaacacagatcctgttttcagggaacatacggtcatctagagtcacaaatatgatcagccaatcagccaagcatatattaataattatgaattgtgataagcacatttaaagaagctatgggagtatatggcaataatatatgatttagtctgaggggtcaaaaaaggctttgatgagaaggtgactttttagtcgagatcggaaaaatgattaagaattaaataaagtgagaagtttgaagagagttgtagttatggggagaaaagagcatgaacacagacctgaggtgggaggaagaatggatgttgaaagaactgacagaccagcagtgtggctgaatggagatgaagaaaagaaggacagagactggcacagatgagactggagaagtgggcaggagagagatcatggggacagtaagtattgtaggcagttaagggccattggtatattttaagtctaggtaataggatcaaatttgctgtactgttgctcctgcaatgtgctgaatgtgaaacctagccaaatgcaaagttttattagagacttggaacctccctcaggtatgtcagtgatgggaaagggagtgagctaatgacatctgacttcttgatcctacctcatcctggtacacagatgaataagctggtggaaacctattttgaaatatatgcttgatgtacacacttagggcaacacagagtttgccatgattacagagttattggaatagaattgtttaattatgccatcaccaattgcaagtgaaatgtacaatcttaggatcttgccacaaaagtcttttcaatttcaaataataattttaaataattttctctttgctatataaactgagactttgtgagcatgtattttaatacacttattttattgatgtatagaattcaagtgttagattctactacgaccctcaaggtcttctatgattttgctacttgaaatacggtccaggtaccagtagcatcagcagcaactaggagcttattagaaagttgaaatctcagttcccaaccaaactaactgaattagaatctgcatttctaaaagatctgtaggtgatttgtttgcacgttaaagcttgagaggaattgccctacaactttattctatttatttagaacaggaacttgatcctatttatataggaatctctatttgaataattgaaaaggtttagtttaatgtcatttttgttcaatttcattaaacataatatctttgtgttttgaagtatgcagctatttaatactgagttgtaagagtcaaattggaagagtttggtaaatcaacatttttaaaaattttctatttctcaaacatgtcttctcccatcccttcgatgggtgcatatttatacgttcttatttaaaatacacagtgtggtaaacaccaacatacatgtagtgtcttcctggaagaagaaggttatttctagactcattcattgaacagtgtatttatgatggaaatgaaaaatgttgtcataaatgcagcaagaggatttggcatgagagaactatttttcattaatcttagggacaaatgactgttttttaaagaaagtttgttaaactttttttaatttgccaaaagaaagttccagagcttaggctggagcagattttgagtgaacaaaattaatatatttcacgtcataaaatttttgaaaatggatttgctgtttgggtccttgcattagtgttctatttgctgctatagaaaattattataacttactgactccaagcaacacaagtttattattttatagtctggaagttagcagtccaacatgggtctcagcagactaaaatcaagatgtcgggaaggctgtgttgctttctggagtctctaagggagaatccattttctggccttttccagcttctagaggccaccaacattctttaccttgtggccctttccactttcaaagccagcaacgacaggttcaatctttctcacattgcatcacactgacatggacactgctgactccctctttacttttaaagacccttgagattttattagattattggatcaataatccagaataatatccctagtttaaggtcagctgattagctaccttaattccgtttgcgaccttatttcccctttgacatacaccatattcataggttctgaggatttgagcatggacatctttaggggccattattctgcctaccacaatccctgcaggaaggggtgggtgccatggaatgtggggaagggagagaaataattctcatgagtgataaggagaaggaagctcctgcaaatggtggcaggctgtgttctcaggagaaagacaccagtgagagtttctctatagtaggggttgtcaatgagactacaaactgatttttatcatggtttttaacataccactttagggtgatccctgttctgcacatttctgtagttctccatgaagccctaacatctagtaaaaaaatctgttatttagggtgactttttggaaagaaggaagaagatgggagagctatgtttgtcaagcctggatgaaagccaagctcagagagaacaaagctgcagagtgaagatgattagaagggattgtaaatcaagtcaggagcagaaattcacagcgagagagagtggaagggagctcacgccattcccatgccccaccactcataggagttcagaggagtttgacattacatttcaactaagcaaaagtgattcgacagatacagatggagttcctcatatggtttgggctctgagatacaaaggcaaataaaatatgttactaccttcaaagtgtttgcagtctaaaggagactgagaagtcaatgcctattataggacaaagtctgcatgcagcaatgcacaaggagcttctgggagcatgaggagaatcttccaaagtggattgtgcatgccaccaaggaaggctttccagagatgaggtttcagttctgtatggaaggatgactctggtgcatcagtgatctttttccctgtttgagtctaatcgttccctctcttcttcccctttcttttctgtgttcaaacaagctctctaaggttccccatttttagtagttttgtaatccccctcccagctccacatgtccattctgtggctgcctcctctctgtttcttttcctgccaaacttcttgaaaggactacctacacttgatttttctacattcttatatcttgtttacctctattccttaactgcctgggttccaaatgctgtctgcaaacctgcctaagactgctctctccagagataccaacaatttctttgctgaaacaaaagaagcatttttcagtccttcatattgtgaactgtctggcacatctgacaccactactaacttccttctggaaatactcttcctttctcttctaggataacaagattctgatctcctcccacctttctggccaagcctgaatctctttatcagctgccttctcctccaaccctccaataagaatcaattatctaatgtatgttcacatacttttgctacagcctgaatgtttgttccacccaaaattcatacgttgacacttaggtcccagtgtgatgatataaggagataaggctcttgggagatgattacatcatgagaacttcatcctcatgaacgagattagtacccatacaaaagaggctcgagaaaaattgctcacccctctgtcatgtgaagatgcagtgagaaggccccatctatgaagcagagtgagctctcaccagacaccaaatctgctggtgccttgatcttggatttcccagtctccagaactgtgagtcataaatttcagttgtttataaattactcagtctgtggtattttcttagagcagctctaatgaactaagtcatttttttatttgaaaatttattcaatgaaatggatactttatttttaaaaaattgaaatgtgtcttctcattcactctaatgggattcaacctatacaagtttgcttcaaatatacacgtattacttctgagggctgccattgccattacaaaaagaaaaaaaaaagaagtctacagagataataaatagctttgctataaggaatagagtataagaaaatatgatggcttatgcttattcccaactacattttctttcggacatttctgctgttttatgaaagcaaatatgccaactttatttgaagttttgttcaacaaaagtgttgcaacagaacaatgtagagaggaaagggtagaaaataattgtggttatgaagttcactttaaaggacttaaaaatggcattaaaataatcaaaagtaatgagctaacaatatttaaacacaactcccatattatgggttgttttctttttagttagtggcagcttttcagaagaaaaatattaagttttcaacatcaaataaactaccatccctacttccactcaaattactgagactgactttttttctaaatagaaaacaccctatttaaaaagtcagtagtatttttctggtattcagaaatatttcattactcacaagtctctaccacagccctctgcccacacaaagagtgactttgaaataataactcattttctcgagaaaaataaggtgcttatgccgagctagccataacaaatatctaaaaattgaatagatttcatcttcagtcttgaactcctgacctcaggtgatccacccgcctcattgtaggaacagatgttagatcacaacaggtagaaaagtgcataagaactaaaggcaaagaatgtggctttcaagaaacttagtatgaaaagaaaagggctaaaaaaaatttttcctttttgatgtttatataaaaaccacactcagaaaataaaggactactagtccatctacaacaacaacaacaacaaaaaagatttcatcttcaggaccattcgtactccagagtgcttcacacaagaatacaggagtgaccctggggttgggcaatgcaacagtgctctgatggttatagagttattccacatatactataaaaacttcactcgtaaactcatctcttatcatttgacattatagtcaaaatggtatattagtaccattagtaatattaagtacaccttgacttaaagtctacagaaatgtagcaatcacactaaagatgaatggtactccaactgctgttttctctccaaaatgtgtcaggtagttacatttattttgtaaaagtcatcatctgttaaatgtccagataaactcaatactttatgaaaacattggctaactcttttggaatttgattagttataccctaacatattttgtaagtatgaattctttttatgtctgactcaaacaagacttctcttttacgctagtgtcaaattttattaggttggttcaaaagcaattgcggtaatgaaattgaaagtaatggcaaaaaccacaattacttttgcaacaacctaacagctgagggcttgattttgggctcaacttgcaatgtgaaaacttgcatatagtcaacattgtctttgaaaatcccctacattgcttgtaaaatatagtccgtggtatttctacaccatattttaatataatctaccatttctaagagtccaatacagccagtctttcactcagccttgcactaggttttgtttcttctggaacagataatatacttcgcttaagtttcggatggggaaggtgcttacaccatgagaggcccataacaactactgaagaaaaaatggatgaagtactccaaactggttttctttccttcttattttctttctgtcttattttctttttttccttctcttttttctttctttttttggagacggagtgtcactctgttgtctaggctggagtgcagtggcgtgatctcagcttactgcaagctctgcctcccaggttcaagctattctcctgcctcagcctcccgagtagctgggaccacaggcaaacaccaccatgcctggctaatttttgcatttttagtagagacaggatttcaccattttagctgggcagctctcgaactcctgacctcaggtgatctgcctgcctcggcctcccaaggtgctgggattacaggcgttagccacagtgcccggccatattttctgaagcactggaagattgagtggcctagtcatcaaacagttcatttctgtgatctgtgtaaaaagaccccacatacctacatcttagtgtagagtagcagttctcaatgtgggtcgagggtctaggacatggttttgcctctgaggagacgtttgtctagggacatttttgatacttgtgactgggggaaggggtgtcaatcttatctaaaggatagaggccaggatgctgccaaataccttataatatagaagacactccccacaacagagtattgtccagctcaaaatatcaccagtgccaaggctgagaaaccttcatctagggtggcagagttaccatgaaatttcatgctcattgaacttggatgaggtactgactagtactatattatcaagtatctaactctatttctcgtctccttaatttttttctcatatagatgttccactttgagcagtagtaaagattttctttcccattatctctattcttattcatgatcggaatgagtcctgtgaggtcaccagggcctctaagttgttaaagggtacacttgggaggggagaggctacaaaatatgaaaagaaacttgttattactttggaggtggccatttgcccattcagacaggtaagagagtctgggtatggtggctcatgcctgtaatttcaacatttgggaggccaaggcaggagaattgcttgagctcaggagttcaagaaagaccagcctgggcaacatagcaatactctgtttctacaaaaaaattaaaaattatccagacgtggtggtgtgcagctgtagtcagggctacttcggaggctgaagtgggaagatcacttgaacctgggaggtcaaggctgcagagagccatcatcatgccacttcacttcagcctgggaaacagagtgagaccttgaagaagaaagaaagaaaggaaaggaagaagaaagaaagaaaggaaggaaggaagaaaggaaggaaggaagaaagaaagcaagaaaccacaactggaagccttaggaggttggcatgtagtggatatttcttttccattccctaaactgtaagtgtttaaaataactattttctttattttttgtagtttactttgaatggcctttatacagaaaaaaagaatcaaattttgttcttaaaaattatttttgttagagacaaatgttagagacaaaaacatgcctccaaaactaggcatgtttatagagatcatgaaacttcagaaaattctaaaaccatgactcgtgacaaataattatacttaggggaaaaatctgagaaagcagcaacttcagcacccttaccaatgaagtattaaaaacaaatggggaaataaaaagatattgttgggattttaaatatggcttaaaatttaatagtgctagaatttattttaaaagtctaaaatcttttaatactcacactgactagtaaaactgcttgtaacattcgccatcaaaacagaaatttgttgaggcaaaaggagagagatcacaatgcaaagcatcgcaataattcagaatactatggtagcacatttcaacattccatctcatctgagatctatctatatgctttccttctacaatacataggagtgtataataaatatgcaatgattatcacatgcctttcctacataagattttgaaacctctcagttgttccctgatgagccagactgtaagactatatgttctcatcagttactacctagtcccacccccaacacccccatctccaccaccactaccatcaacaccaccatcaccattacaccatcacccccatcatctcctccatcagtcgatgcatggacaccacctccactactatcgtgactatcaccactgccaccatcacatcactgctctgaaacaatttctctggattcaaacggtcccgaaatctaagataattctagataggggtttgaattaactattgatcaagtcaaggacttaccgtgaaatataacagacatatcagatattcaaactgaattctaaaataatgcagagaaatatctatatgtttttggtttatagttgttgttctaagcaataagtcataaaaagaaagttatgatagatttgatgatctaaaacccaacatgtttggcatgtcagaaatgcaacaaatagaattgaaacactaacaatggttttaaaaaagtcttgtttaagtcagtaaggatgaatagtgctactatttatatttattcatatggataagccttagagagaatcctgtttactcagaaaatgatagatttgagatgcttgtaaaatatatatgagttattaagtagataattgtatatttatacaactaaaaaggcattcaaataattttttgctattaaactcttactttgaatgtgccatgaaaatgtttattttatatttctgaaagtatgtttccagcaatatctcctaacccttttaaaagtcagctcctatcttctggatgaagtaaatgatgccagattcagttctgttctccttctctttttggaagcattataatattaatgacttaattgtcatacatatttatgttttagaacctaactggggtctgctctcccatcggagcaaagccagtcactgacattgggatagcaatgagagaatgtgagtcatttattgcaggacaccaagcaaggagttaaggctgctcatgcttaggacttgaactcctcaatggcttgcagataagagattttagagataggggtacatttcaggagagcagaggttacaggcaaaattgtaaatcaattcatgaaagttacacattggtttaggctaaaaatctgaacagacgtttcttgaagtgaggagtttacaggttgtagattgattcaaaggttttcagatttgcaactgattcaggaggtgaggttttgtctaaaaatttgagatcagcagaaaagaatgttagctctagctcctgggtaggaccttcttcaggcccctcaggaagaaatttagaacaaagaacagaggtcggagttcagtcctcacctcccccttttctgaggcctaaatgccagtagatccatctggtgggttcctggtcggatgccagtttctgaaagacaactcaggcacatctgttaagatgtcatctttagtttccatggaaaaagcaaacatcttcagagctctaacttctttgattattgtcttaagctactattatcttcctgtttaaaaaactatttatttacttttctgctagctagattcctggaatttcccttgaagaaaccaagcattttcctttatgtctatgcttgggggtccatagttccctaaaaagagggtccctgctcgtcttacctatgtaataaaagaaaaaagtccacacatgtcagaaacgggtttggcaataactctcttaggttggtgcaaaagtaattgcagtttttgccattaaaagtaatgggaaaactgcaattacttttggaccaacctaatattcatttttaatccagtcggcgggttgtgaactaaaaagaaagacagcagtttgagctcacaacctgctgataaacgtttttgcagaggaaagggtaagatagagagaaagtgattgttgcactgctcaattgaccacaaatgtatattgccccaaagaatacatcagaatcaaacccacggtgacttttttgaaattttacttcgatataccattgacataaactgtaattggaaagctaccagtttttctcccaaaacaaagccaaatatgagaacaacaaactaactatatttgtgtacagcaactgtagtggtatagcttctcaaattcttgaagaagggtcttatgtttaatgaacaagaaatattttcaaagttggaaattactctcatttaaagagaagggttctcattttcccatgaattttctcatgaaacagtatgctttcctacacaaatattgtatctataatatcatatgtgaatattcatattcataaatgccaaattattgatgactcttttgcttcatatgtgtattatagttactccaaaatattttttcatgatccagtattgccataaaataaagactgcagattctagttagcaaagattctgaaaccaatcttcagtcaaaggaatataaaacgtagcatgatgctaagtttatggatctagtgtactaaggagaggaagcaactaggaaaggttatctactattttgtggaagaaataaagacctacaaaggttgctttttgggttgtttaatagtctatgcattgtgtggatgtgcaatattaatttaggtggacataaattctttttgtccctttactatttcctatatccatccctccccatcaccaaaataagttagttggctactatttagggctactatttacttttactaagttaagaagtgagcccatatcatcctagatggtccagggaacagttagtgtaatacattcactgatgtgttttttgaggggaaaacacgagtccctcaggaaatcctgatgcagttgacctttctctggtgtctgtttcctggggcaatgcttgaatgtggttaagcacacttttgcctcatcggctcctccactgccacttccaaccactcctccactagcttctaggactggtccatttggcatttcaataaatgttcccaaggttggctaatttgtaccaatcattgaggagtctcttgacctatctgaggtagcaatactggaagcagggacagattctgttaagtgttgtatatcctgtattgaaactgaggctgattccatcaaaattcaagggcagatcctctagaaggtgctgctgtagttgctgcagctgttgcctctggtgaagatggaggagtccagtactagccacttaaggaggttcaactatagccttgctttctatttttccaggacttcccattaaaagatattttgcagacaagccacagcccgggagaagatatatgcaaaatacacgtgtgataaaggacttgcacccataatatacaaagaattcttaaaactcagcaataaaaaaatagacaatgcaattaaaaagcaggcaaaaatctgaacagactcttcaccaaagaagatgtgcagctggcaaataaggatatgaaaaggtgctccacatcatatgttattaggaattgcaaactaaaacaacgaaaaacaactacacacctgttagaatggcaaaaatccaaaaacactgataaaatcaaatgtacacaaggatctgtccttcattgcttgtgggaatgcaaaatggcaccttgaaagacaatttggtggtctcttacaaagctaaacttcagtcttaccatacaattcagcaatagtgctcctaagtatgtggcccaataaattgaaaactcatgttcacacaaaaacttgcacataattacttatagcagctttttttcataattgatgaaaattgtaaactgtcaagatgtccttcaataggtgaagagatgaacaaactgatatgtcaataaaatggaatattattcagtgataaaaagaaacaaggtatcaagccacatggagaacctcaaaagcctattgctaagtgaaaaaaacaaaaagccaatttggaaaggctacatgttgaatcatcgcaaatgtatgacattctggaaaagacaaaactacagaaactgtagaaagatgagtgtttgtcagagggaggtaattgagggaggaatgaatagatggagcacagaggacttttagggcattaaaagtaaactgtatgatattatcatggtgactatatgacattatgcatttgttaaaacccacagaactgtacaacaccaaaagtgaaccctaaactaaagtacagacttcagttaatataatggatgtattaatattgtttcacaaatagcaacagatataccacaacaatgcaagatgttaataatgggggaaactcctgtggtgggtagcagaggtatatgggaactctctgtactctgctcaataactctgtaaacctaaaaatctctaaaaattgaagtctgttagggatgaaataatttttagatacatggtaaagaaaagaaaagatactttactgctctgccagcgttgttgaaactagttttgagagctgtaattatttgttcctggtcataacatgtttacatgatctcattaccctatttttataaggtcaatctgtcattaatgttcttgatgcatcttcaaaatgttttccagagaaaaatcttctaatgagttctcagttgatattgggctactaatcactgatgttctcactgacttttctgcaagtttctcttgtttagttgcactactaggtgcaggtgcagaagatactgtctttgatgctggagtgatgggtacagccgcacaagtggcaagcaaagcaaagacagaggctgggacttgagccacagctgctgttatagttgaaacaactgcagcagcagtggcaggattcgatcactgggttgtagacggggctggtgctgccactgctttgggataccatcataaccatcataaagctttccttattaagatcatattctttaaagccagtatcatcattcgggttttgcctcaagcaacttatttttgtcccactacctaaaatgcattattcactctcacttcttttgctataaaactacaaccaactccaaagggtctagtctcctgcattaagctgaattttggaacccaggccctaactgagcccacagcccacagtacatacatatccccagagccagactcctacttctgttacatctgccttgggttcttacagtctaccaggatagaactcaagagagatcaccaaacataacagcaaaggaaagtttacttcagcttgtgcacaagggagccagcaccaagaaagaaagaggaatgggcttctcccaagggtactgtatgggttagttttatagagtctttcaatagggaagagttatgtcatggcaggtgtagcaagggttttcctagtggtttcacagtggctcaacatgcttcttcagatgttatatgtagcattaacaatttaaatctctgtcacttggtgtgaattttagcattaaaatgaggaagagataaattcagtttggagtttaagtcttaccaagtatacaaggatccaggaagtccctcatcccctgagatggaagactgtggttaatagcttcttgggtctttcattactgattgactgagagtttaggtaagctagagctggagtgaggggcttttgccctttttctctagaccatcttaaaatagggaatcaaccaacctgcctgtctcaccccctaccgccatgtcacagcacattgtccaggcctctagaaagctcttctctgctaaggaagtcaaattttctctgtttgcagatgacatgattgcatatttagaaaactccatcatctcagcccaaaatctccttaagctgataagcaacttcagccaagtctgaggatacaaaatcaatgtgcaaaaatcacaagaattcctatacaccaataatagacagacagagagccaaatcataagtgaactctcatgcacaattgctacaaagagaataaaatacctaggaatacaacttacaaggatgtgaaggacctcttcaaggagaactacaaacctttcctcaaggaaataagagaggacataaacaaatggaaaaacgttccatgctcatggaaagaaagaatcaatatcttgaaaatggccatgctgcccaaggtaatttacagattcaatgctatccccatcaagctaccattaactttcttcacagaatgagaaaaaactactttaaatttcatatggaaccaaaaaagagcctgtatagccaagacaatcctaaacaaaaagaacaaagctggagacatcacattacctgacttcaaactatacaacaaggctacagtaaccaaaacaacatggtactggtaccaaaacagatatatagaccaatgggacagaatagaagcttcagaaataacgccacatatctacaaccatctgatctttgacaaacctgacaaaaacaagcaatggggcaaggattccctatttattaaatgatgctgggaaaactggctagccatatgcagaaaactgaaactggaccccttccttacaccttatacaaaaattaactcaagatagagtaaagacttaaatgtaagagctaaaaccataaaaaccctagaagaaaacatagacaataccattcaggacataggcatggacaaagacttcatgactaaaacaccaaaagcaatggcaacaaaagccaaaattgacaaatggaatctaattaaactaaagagcttctgcacagcaaaaaaaactaccatcagagtgaacaagcaacctacacaatgggagaaaatttttgcatctatccatctgtcaaagggctagaatccagaatctataaagaacttaagcaaatttacaagaaaaaaacaaacaaccccatcaaaaagtgggtgacatttatgtggccaacaaacatgaaaaaaagctcatcatcactggtcattagagaaatgcaaatcaaaaccacaatgagataccatctcataccagttagaatggcaatcactaaaaagtcaggaaacaacagatgctggagaggatgtggagagataggaatgcttttacattgttggtgggagtgtaaattagttcaaccattgaaagacagtgtcattgtggaagacagtggggtgattcctcaaggatctggaaccagaaataccatttgacccagcaatcccattactgggtatatgcccaaaggattataaatcattctactataaagacacatgcacatgtatgtttattgcagcactgttcacaatagcaaagacttggaaccaatccaaatgcccatcaatgatagactggataaagaaaatgtggcacatatacaccatggagtactatacagccataaaaaagaatgagttcctgtctttgtggggacatggatgtagctggaaaccatcattctcagcaaactaacacaggaacagaaaaccaaacactgcatgttttcactcaaaagcaggagttgaacaatgagaacacatggacacagggaggggaacatcacacactggggcctgtcatgggatggggggctaggggagggttagcattaggagaaatacctaatgtgaatgataggttgatgggtggggcaaaccaccatggcacgtgtatacctatgtaacaaacctgcacgttctgcacatgtatcccagaacttaaagtataatttaaaaaaaaagaaagcttttctctcctagatccactgccacaccctgcccaaattatcttttaaatgactaaatagaatcattatattttccactagcatgaattctcagcaccctaaaataaaataaatgttaaattaaagagacacagttcacactgagaaaattatatgatgctatatttaaaaaaaaaatatttttaactattattttttaatccccttttgcttttcagcatttatgatctagtacctggccatagtaacatccaaatgtgctcatggagaggcttagggaggaataggtttaatcaaaagttcagttctggaaaatttatatacgtttgaggtgatcatggatgtattagtccattctcatgccgctaataaagacatacctgagactgggtaatttctaaaggaaagaagtttaattgattcacagttcagcatacctggtgaggcctcgggaaacttacaatcatgacagaaggggaagcaaatacatccttcacatggtggcaggaaagagaagggcagagcaaagttggggaaagccccttataaaaccatcagatctcatgagaacttactcactatcacgagaacagcatgggggaccacccccatgatctaatcacctcccaccaggtccctcccccaacacgtgggaattataattcggattacaattcaagatgagatttgggtggggacacagagccagaccatatcagatgtccatgtggagttgctgcataggcagatactaattttagaatttttatagagatagcatgaaagccatggggctaaataaaattacctagtaagtgaataaagagaaaaataagcctctgaggcaaaccagtttagaaattatgcagataaggaagaaccagaggttgcaaaagagattgataaggagcagccaatgagatagaaagagaatcaagagtgaggaagatcctggcttggagcaaagaatgtgtttcaagaaggaagggatgatcatttgtgtcaaaacatgtttagaggttcaaaaactgttcataggttagacaatataggactgagatttggctattgcatttggcgtcatgcaggtcattggcgatcttgaacaatcagttcctgcagagagaaagagacaggaggcagatcagagtaggtttgggagactatgggaaaagagaaattgcagacaattagtagagacagtgatttttcagaagtttagctgtaaagggtagcaaagaaatggaaaatggtgctgaaggatatgtggaatcaaggtgagtttgctgtaattttttttatatggaagaaagaagacacaactgcaggagtgaagcccttgagcaggtgagaagtgatgagaagcagtgcacaagaggagtatttagccttaggaccaaggacagtctatcagttttaactacaggaaagaatatagggtatgtgagtacaggtacaagttggcagatttttatttatttttccatgaaataagaaccaaggccatcagttaagaataaggagcagggaggtggttttggagacttttgtagagaggagaatgtgcgaaatagttgtgagacagtggaggatttacccgtctcagggaaagctgacaaactcttctcttaggcaagtcagatacctatccaggggattctcagatggataaaatagtttgagcctttcagtagagtttcatttcattagaaaaaccaagaaatactaattagtttccatccttcattaactgcattcaaaagcactaaaataaataatttgcctatttcattgtccaacagaatttcacggtttgacccagccaagaatacaactccatttcaatgtatttctatttgagcctaaatttatagaacaattcaggaaaccatcaagattattgagtcatacagaagcatctttcttcccagtgtttgctgattgagaccatagccttagatgaagggtctcatctctgacccaaaattggcctggaaaatgagacaagatatcaaattattatagagcagctcaaataaggaaaaccttcattatactatgccaaagtaaggatcactgaaacttggacaatgtcgatggtttgttactacatctatccatgacactttgtactaacaaaaaagaaaagaaaattgaattatctttatttgtagtaacactttccctttaaaccaaagcagcttcaataatcaaaataatcctaggattgtgacactaaatgttattttcaaaatattttaggtcagttaaccaaaataaatgttcagaatgctgaacttgatcagagttttcagatgtcatgagttatttcaagaaatatactaatgcccaaagtaaactgatagaataaaataaaagccaacattactcttgattaatgggaatacaaataatgtaacgactaaggaaggttttacaaaatgacagagattgggattgctatatttatgaattgacaagcaattgctctataaattaaataacaaaaatcaattttaactgttaactgtcaacaataaaaaattgcccaaaatttaaacattaaacttccactaatatttatcactaacaacttttctaaaaaaaaattgaagttttaaaatatagctaagtgataggatatgcaactgtaataaattactttgaaatcttgaatttaactattacatttgcctacaagcttagaaatatatgagtagaagtaatttagatagaattctggtttctgctctgatattaaagagcttagaatttattactgttatcctcacagggaaaaagtggtcagatagaacattaacttttcttgaacccatcagagacctgaggtcacagggcaagttgccagaaatctgaagagatgggagacacggctgagacctgcttatctgaaacaaaagcaaggggagttttaactggaaggaacactgaaatgataatgttggtaaatggtttcaggcagaatatgggctaaggttactgtgagaaactcccaggggctggagacttgagggacatttcataggttttgcttctagtacctccaccatgttctcacgatgaagatccaacaaagattcctgtggctgtggcaggggtagaggaagagtcatcattataaaataagcctattctcctggaaaaacaacttcaccagaaccttattccagctggtgggagggaattcttcctactccacccgctccaggattgctgttttactaaagagtgggtaaggtgagggagtatgagggggagacacagtcaacagaagtaggagcttcaaggaagcaggttgcagccaggagagggaggagaaggcctgagtggcagaagctatactgctggagaaacacctgtgaaggtcatagtccaaggacaaaggaccactgatacactgaaatttaatcaaaagattagagaatgctccccactctgccataccataccacactgctgttgtttaaatatttgtctcctccaaaactcttgatgaaatttaatccccagtgtggcagtattgagatgtgaggccttcgagatgtgattgggtcatgagggctctgtcctcatgagtggatgaattcattaatgaatgaatggattaatgggttatcatgggagtgggattggtggctttataaacagagaaagagagatctgaaggagcacacttggtcagtccccttgccatgagatggcctgtgccatcttgggattctgcagagagtccccaccagaaagaaggttttcatcagatacagctccttgacctcagacttctcagcctgcataatgataagaaataaattcattttctttataaataacccagtttcaagtattctattataagcaacacaaaacagactaagacacacaccaacaaagctaaagtattatagtgggctacacctgaaagagccacaaggagcagactctctttgaggaggcatacttaggggagtctgagagggaaaacaaaaacaagggcagtagaagacttaagccttttcacatttatggttaatgtaaatttccatgctaaaggtctgttttttctcaattcctattactcatatgtgtcatttgcacctatcaatacaaaattacaaggtctgatgataaagcaagaaaacacatagtttgaagaggtaaagcaagcattagaactagacccagatatgacacacatttttgaattatcagatagggaatcttaaataattattattaatatgttaagaggtcctaatggaaaaagtagacaatgtgcaaaaatagatgactaatgcaagcagagagatagaaaatctaagaaagaatcaagaggaaatgcaagaaatccaaaacactgtaacagatatgatgaataatgaggtatgcactcatcagcagactcgacatggccatggaaagaatcagtgagcttgaagacaagtcagtagaaataactaaagtatctaaaaattggaagagacattaaaagttgtctactgtatccatttatttaagaactggtttaaacacacgccctctttcctgatgggattccaattatgtcagtaatcatctaattctcactttcaagattattgcaagcgtgtgattttaacatgactatcatagataaaacaactttacccattcaaataccatttggccattactgagcaatgtaacataccagttatatacagttataatttaattcaaaaaattaaaaagagagtctacattttcctcactatttgtgtaatatctcggccaactttttaacatctctgtatgatcattttttaactaaatgccatatatttttcacactgtaccctttacactcagctagctactgctgccttgatactttctgggactaaggatgagctgtcaaacactataactaagagctcttatttatggccttgcttccttgaactcagtatttagctttacttcagtcagtgtcgatttcagtccagctgttcatgtttgagtatttaggttacttgcttccaaatactcatgacactgaactattgaaggtcaagttactgctaaatggactgttttgtatattataatagcagaggaatattatagcagtttcataagattattagcttttcctactttcacagactataattggcatttaagctcatattcatatattccccatgcccataactctcatttatatgtgtgattctgtgttgttatagagagggctaagaagaggtggcccaggcctttaagacataatcagactatacctgtggtattagcctcaccttggaagctttttaaaaattctatcattcaagcctatttgaggtgggacctgtttgagttggggcctaggcattaatatttttaaagcactctcccaataactgtaatgtgcaaacggggttagaactcctgaactactttctataataataaaaatctcacataaatagctttaaaagagatacataagaatgtctcaaacaaacacacacacacacacacacactccctccctctctctcaccctctttctctctctctctctcacacaagatttcacaggattgagagatcatatccaataaaagttcgcaacaaaggctcatgagcgtaaaggactgcaaaggttttggacaggaggccctgactgagtggaggcacattcctggcagagggaaactgtgatggaaggaagggaaaccaatacacttcacaaagacctttttgaacaacattgaaaagaaaaacccagaagagaatacaataaggaattgtagaaaataagatgagacagggagcagggtccccaattaagaggacatcaaacttacattttagggtgctgtcattttaaagtgtttctaaaacactgtagtttttcatattatttaaatgtacagaaacttaaacctatggtcctgttacccagtgatatggttaggctgtgtccccacatctcatcttgaattcccaggtgttgtgggagggacccagtgggaggtgattcaataatgggggcgggtctttcctgtgctgttctcttggtagtaaataagtctcacaagatctgatgtttttaaaaagggggagtttccctgtacaagctctcttcttttgtctgccgccatgtgagacgtgtctttcaccttccaccatgattgtgaggcctccccagccacgtagaactgttactccaataaacttctttcttttttcaaattgcccagtctcaggtatgtctttatcagcagcatgagtacagactaatacacccagcttaggaataaaacactattaatgcagttgaaatctcctatgttttgttccataatcataattaatttctcccttagcagagataatcattatcctacatttggtgtttattattcttaagcatttcttatactcagatgcatagatattacttagataatacatagatgcttatgttccaaaacaaaacaaatactccaagttaaaaaatatattgtgaagtttaatagaaaagacatggaatcaacctaggtgcccatcaatgacagactagataaagaaaatgtggcacatataaactatagaatactatgcagccattaaaaaagagtgaaatcttgtcctttgcagcaacatgaatgcagttggaggccattatcctaaacaaattaacacagtaatggaaaactaaataccacatgttctgacttataataagtaggagctaaacactgcgtatacatggacataaagatgtgaataataggcactggcgattactagaagagggagtgatggggagaaagggctgaaaaactacctattgggtactattcttactatgtgggtgataggatcattcataccccaaacctcagcatcacacaatatacctatgtaacaaacctggacatgtatcacttgaatctaaaataaaagttgaaattataaaatatatacatatttggctggatgtggtggctcacacctatgatcccaacacgttgcgaagctgaggcaggtggatcacttgaggtcaggagttcgagaccagcctggccaacatggtgaaaccctgtctttactaaaaatgcaaaaattatctgggcgtggtggcgcatgcctgtaatcccagctactctggaggctgaggcacaggaatcacttgaacctgggaggtgaaggttgcagtgagccgagattgcaccactgtactccaacctgggtgacagagcaagactccacctggaaaaaaaaatatatatatatacacacacacatatatacacatatatgcacatatatatatatatgtgtgtgtatatatatatatatatatagagagagagagagagagagagagagagagagagagaaaagttttgaagagaataaatatggcataatgaaaaaggtgtttcaggaagttgggtctagctaaaacatacagtacagaaagtttttgtgtcatctaggagtatttggaccagcatgtaaaattgggcttagaaaaggatggatatcaaaaaatggaaaagaaatttcagcgtcttaaatatagagaatgaggaagcagaatgagtcaaaccaagatactaggctttgtccccgaaggattaaaataacgatgtggtgttgacagattcagtgagtcacagtggaagaactggtttccaggagtatagatgtgttgtggaatttggccctgctgaccattccctcattgctgaagcactctcctccctagccttctgccatccctttcttttggctttgttcctacctctttcattgttctaagtcttccttatggtcttcaatttgtatccaatttttcttacagctaatactctcctggactgactcattcacttccagggccttaatacacaaatgctgatgacttccaaattcttatggccaacatgtaaagtctcctcagctccatatttcatttctaattgcctatgggtatttatcccacagccacttttaacatgtccaaaattagtcttattaccatcttattcccttctcattttattcatcccttttattcttacttattcctgctcctttattctctatctctgcaaatgttctccaagttttatcatcttaccaaagctagaaaactggaaaacatcctcacacttctccctgaacatgagctgtgcccactatttaatgccatgtcttgccaaatcaacctctttaattgtgcttgtattgttttccacttttcaactgtctccactgtcttaatctcaggtggttttaactatgttctctggcctattacaatattctgtaaacttatcttttcacccctagtcttgtccaattccttctctctgtctctcttctactatgagtgattttcttaaatataaatttgatcattccctgctcttaggtggaggggaaattaggacacctcattaccttctgcagaagctttccgtcttgttcttttaaatcctaattaggactctacagagttaactcaaagacaaccaatggcgccaagtcagaagctgaaagacaagtgaattatttgatgagacacaaaagcgttgaattcaaaagcacaggcccttttttccccactcgttttgctgctaggaaattcactcagcaaatatttatcaagtatgcaccatgtgccagacactcttctcagtgctactctatattaattctactaattcctataaaaacccatggatattatttcaattttacagatgaagaaactgaggcatattactcaaggttaagttactcaaggtccccagctcggtgaagtccagaaccgggacgtgaacccagataatcagactctagaattttgctactcaaagtagaattcatgggccagcagaatggtaacactggtgatattagaaatacaggccctgtgcttctaccctagacttaatcattatgtaaatttttacaagatttccaggtgatgtgtgcattacttcatgcttgaaaagctttgccttcaagtctgggttcttaaccacatgtcaacccaatataacagtagttgacttgttctttcttcctcagacatgtgagttggctctcctttttatgtacctgtcaaacacaaaagtaacaagccttaaaaccttgcccctgccaggcgcggtagctcacgcctgtaatcccagcactttcggaggctgaagcgggcggatcacctgaggtcaggcgttcgagatcagcctgaccaacatggcgaaactccatctccactaaaaatacaaaaattagccaggcgtggtggtgggcacctgtaatcccaactactcgggaggctgaggcagtagtattgcttgaatccaggaggcagaagttgcagtgagccgagatcgcaccactgcactccagcctgggtgacagagcgagactctgtctcaaaaaacaaaacaaaacaaaacaaataaacctcaccccgatccttttgtagatcatgagcatgatgattgggtgttgacacaaatatgtgaaatgtgccagcctcaaaccttcttatgacatcagatcagcacatgactctgctgggaagtcattaatccattatacattaagtatctggaacttttctggttaaaacaaatatatacctatatctctaagagatattattcttgatgtaggtcaattttataggtcctgaagaggaagtagtgtaccgatgttcaaaatgatgtctggtcagtgatggttgtccaaacacacacacacacacacacacacacacacacacacacacacacacacacacacacgggggaggggggagagagagagtcactgtgttacccaggctggaatggagtgtctattcacagatgtgatcacaagtccctgcagcctttgacccctagactcaagtgatccttttgccacagcctcctgagtagctgggactacaggcacacaccaccatccctggctcaaacacttgatattagtctaataccagtagccagacaggctagaggagggatgaaaccagctttgtctatgtagtagggaacgttgaggatcagataccattacaaccctaactgataacacaatcagctatcacaatcttaacagtgacttgaggtaatacgtatcttctaagttaatgtgggagagaggtgggtttcaggataaactgtaaaccgctcattcttatgagactcacttgaggaggtttctggacaagcttccacattgactcctcactcacatggaagttgtttccagcactttgtgaagtctcccataaaacatgtgaaactccatcaagtagtaataagaaatggaaggttcactgaagatgttgcagagagaaagagaagatgccatgtcacacaccacacagcagaaatttaggcaaaatcctcattagacataagaattcttaatgtttttctttcccaaacactttcttcccaatctcaatagcttttcttccgttttctttctttcctcctttcctttttcaggcagtatctaacaaactgcaatactcttaccagtatcaactttaatgctaagcttaaataatgtaagcaaagcataaactgtagagttcaaaacagtaataaatctcctagcaggtttcactatccatcacacccacccaacctcattctcaggatcctgtaaaacaaaagcaggtctcttctaggcggggatagggatatgcattgttaataagtttcttcatcctgctacattctcctctggtgccagcacttcttcatattttctatagaactaagaataaaagcttttattctggtggctaagggctgaatggacatgctatcctcaacattcaaaaagcaaagtgcctgctctttggatgagtgcatgtatttatttatgtgataagtatttgaaacaggtctttaagttgcatatatttataagatacatgtcatattttgatacacacatataatgtgtaatgatcaaattggagtaattgggagatccactacctcagtcattgatcttgtctttgtgctgggaatattccatatctactcctctagttatttttaaatatacaaagaattactgttaaccacagtcttcccattgtgctgctgaacactagatcttatttctactatctaactatatttttgttcctgttaacaagcctctctttatctccccttcccactacctttctgagtgtcattctactctctacttccataagatcaatttattttagcccccacatatgggtgagaagctgcaatatttgtctttctgtgcctgacttatttcacttagcataatgccctccaattccatccatgttgttgcaaatgacaggatttccattctttttatggctgaataatatttcattgtgtgtatgtaccacattttctttatccattcatttgttgacagacacagaggttgattccatatcttggctaatgtgaatagtgctggaataaacatgggagtgtagataactgtttgacatattgatttcctttcttttggatatatgctcagcagtggaattgctggatcatatggtacttccaattttacttttttgaggaatctccatgctgttttccatagtgactgcactaatttatgttccaacaaacaatgtataagcattcccctgtgtccacatcaccaatatctgtgttttttttttctttgtaataatagtcattctaactggggtaaaatgatatctcattgtggttttcatttgcatgtccctggtaaaaaacattttaactctggtgagaatttaattgatgaaggattaataaccagaatatataagaaactcaaacaactcaataacaaaaaaaaaggactccacataattcaatttcaaaataggcagaagatctgaatatagacgtttctctaaagaagacacataagtggtcaatgagtatatgaaaaagtgatgctcaacatcactaatcatcagaaaagaatcaaacagaacttacatatatttttaaatattgaatttccacatgatgtttctcagaaaagggagttcccgttttaaaagtagttttcaaaatattgaaaacaaataatagacaacataaagtcttatgagctcaaccttctttgcatggtgcaaggttccaggtcatctggcctcttccagccttcctagcctttgctcctactacgctttccttacttccaccattccctggtgatcccaccagcactcttaagattccctcgaggcatatgatacttcaagcttctgtgcccttgcttgtgctgttctcttcattggccttgggagcactcacttaacacagtttgaataacttgtaacaacttctattgttgctgctataaagattttactgatctccattgaaattgatcacatctgtgtttgttaccctgcatctactaatctcacttgtatcaatagtattcatgtgtgttttatctttagtaaactatgttttttcacagcaaggactgttttattaatacctacccttttgtttaatgtactattcacttactcgagaacttaagcttgtgcctgatgaaagtaaatatactttgaatctctgaaagggtagtcatttgaatagtccttttcaaactgaaatggcaaaaagctgtaataaaagaaaactcatgtagatgtgtaatctgtattaaggcacactctgtttgagaagagttagtatgtcatgggttttttaaaaaaaaattattgtattctatctttaaagtgtcttgggtaagcatgtggcattaatagtttagtcataactagagacaattgtgtcttacaataataagggataaagatgtgatttctggccaggcacagtggctcatgcttgtaataccagtgctttgggagaacaaggtgggaggatcacgtgaagccaggagttcgatatcagcctgggcaacatagtgagaacctgtctgtacgaaaataaaaaattagccacgcatggtggtgggcacctgtagtctcaactattcaggaggctgatgtgggaggattacttgaactcaggaattggaggttgtagtgaactatgatcatgccattgcattccagctttgggcaacagagcaagactttgtctctaaaaaaaagaaaaagaaaaaaaggtgcaattttcaactatttcataaagtctgagatgaatcttaattttttaacattttcattcctaaaaatctctgctctgttgaacaacagaattgttcctaattaagaataactctagccaagcagagtggctcatgcctgtaattgcagcactttaggagactgaagtaggaggattgcttgagcccagaagtttgagaccagcctgggcaacaaggagataccctgtctctacaagaaataaaaaattagctaggcatggtcacgcatacctgcggtctcagctacttgagaggctgaggcaggaggatccctcgaacctaggaggttgcggatgcatgagctatgattgcaccactgcactccagtctgggcaacacagtgagaccttgtcgcaaaaaaaaaaaaaaaaaaaaaaaagaattccatacacccccatttgcagtttctgcttctaaaggaaataagcttatttccccactttcggactgtctacagtattgttgtacatgtaacacatgacatttagctggtaattgagatctagaagtgtcattagtcatcatttctttttttcttttcttttttttttgagacagagtctcactctgtcacccaggctggagtgtagtggcatgatctcagctcactgcaacttccgcctcccgggttcaagcgattctcctgcctcagcctcctgagtagctgggactacaggcacctgccaccacacccagccaattttttgtatttttagtagagatagagtttcaccatgaagggcaggcttgtcttgaactcctgacctcaggtgatccgcccaccttgtcctcccaaagtgctgggattatggtgtgagcaaatgcgcccggccattagtcatcatttctaatgtagcatcaaaacatttccacccgtgcaacggaaatcaatgtaaactttaaaaatatagttagcaggccttggaaattttcataggcaataggaaagatttataaattagttccgatgctaaaaagtagaacataaatttatgtttgaatgtgtgttaataaaatggaatgcctcacagcgcaagaatattgtgaaaaatcatcactatcttttaaaaatgagaatactttgaggattcaggcaataaataaatgcagaccagaccacttatactgtgcaattagctagacttgaaataaaactttgaaatggttaaagttctttttgaattgtactgaaataggggaattctatttctagccctgtgatttattcatattcattctatgactcatgttatgaataaatgtggggcactggctgaatatacattttagatagaagagagaaaaaattttaattaccataagaatagaattaataaaaaaaagatgtagacaaataagcaactattagtatgctatttgatccaaaatatgaaaagtaattactaaactttggaaatccaatgaatgtacagtttgaaatgcaaagtttatgtcagaagagaacaaaacccaaaaaatctaaaaaattttttcatccccaaaaagagaagatatttcctatgtatgtttcacttgtatttcccaaccatttagtaaaaaaatgagaaatgttactgttaagtttgtacttagttgagttcataaataaaattatatacaattccctagacttttaggtatcggtatcaagtgtatatcaagtgtatatattttatttctgtcttcgaggacatccttaagtgtaactttttttgtcattaagttttctttctcacttgtttccaaagagaatagccatattgcaactcagaaaccaatttcaatttgttttagtgcatgtctagaatcagagaggcttctatttaatatttaaacacattaattaatatttaaacagcaaagtacttgtgccgggtaaattctaactagagtaaaatggaaactagtttgttcttcccaggtgtataaccataagttggtgatgctcggttaagaggcttttggtatgcgcgagtgtgtgtgtgtgtgtgtgtgtgtgtgtgtgtgtgtttgatcattttcggtctactcaatgtaatttccaaattaatctacctccaagttgaataggcaattaaactagttgaaacacttaatgactgttaaacttttaactgtgtgctcctgaagaaaataaaattttcaaaaggaaagcaacattttttccaaatgtaagtttacagccattgttatataaatatgctttttcttttgcttatctaggcaatagattaatacctgtccttaagaagtataccgtttagtatctttaaagtataaatatttgcaaacaaatccctttactattcttttaactgtatacgtggcaaacttcaaaagtagaaggaattaggaggctaaagttttatgaaggatggtcattttctaggcctttaagatttgttgattagaaaaaatgtcctgatgtactaagcagtccataagaactctagtttaaatgaccaaaagaaatgtaaacttagaatggcaggtaaatttgggttggtaggtaaggattaaaagaatttggatttgatggaatctttttaaagcagtctgggtctagcatggaactacccctaaagaatattggaagagtctggccgggcgtggtggctcacgcctgtaatcccagcactctgggaggccgaggagggcggatcacctgaggtcaggagttcgagaccagcctgaccaacatggagaaaccccgtctctactaaaaatacaaaattagccaggcattggtggcacatgcctgtaatcctagctactagggagggtgaggcaggagaatcacttgaacctgggaggtggaggttgcggtgagctgagattgcgccattgcactccagcctgggcaacaagagcgaaactccatctaaaaaaaaaaaaagaatattggaagagtctaatacatgtggaagatttttccagtgtcttcaatttatcaaaacactttgagagtgttttaaggtcatggaataatccccaatatatgttattaaatgaaaatacagcaaggtaaacagtagagggtattcgatgcttttttccccctctgatttctatatgcttgtatatgcacagaatatgtctccaaggatagaaaagaaacttgtaagaataattggcagtggagaagaaaacaagggaattggatgaaatattgtcatctgtatatccttttgaaattttgcaatttatctctttatgtatatattgtctactttaaaaatctacacaggtgccagggacctagttctactgaatcagaatttctgggatccggctgaggcacttgtatttgtagcagctgtaactcccatttggcacttactgccttcctttaagggatatccgcctgaaagtataagttttatcccatcaactagataagcacatggtgaggaagggggatcttatgcttctgttgacaagggtagtgcagaggtataactatgattctcctattaccttacattatagtgaggaagagttttggaaataaatttcaacataataggattacgagatccttaaaattgttcacttttgattgttccaggccaaatgtcagtaagtgccaacaatatgatattcacaccaactcttgttttttgaagggcataataatgaattaattaaactctagatacctaaaaggcagagtaaaatctaaagctagaactgcagtccttggggatgtatggttatcagatacagaagtcacattacattgcagacaggttccctatctctaggatgatagatgtagggcaacccagtggttcctaaacttctcttccatcattgtgtctccagcaagcacaggttttgcagaacatccatgaagatctggtgtcccactattttgttttggacacagtgctgtaattcagaccctttccagcctcatggccaacctatattgtacacagtttgagctggctcttcttagttctgtttgtgtctcccttcacttagtacatacacattcctaaaatgctctttgaatgaataaattaatggatgaatccctttttgtgatgccctgggtctttttatgttcaattcttctgctaacaaaccgtccttcccaccttttatttttattccttcctctaactgatcccaagtggcgaacaacttgtattagttaaccagccatgtttgggttgtaactcgcaagttttagcattgcatagtctggtgaaagttcactcccttgggtttggaggttcatgtgtgctattcaaattaatgtgtcttcattcatgtttaattataaagacgtttttctttggagtgatatcatctgtaatctggcaattattaagacattcttaacattcatttcttatagaatgtatacaattagaagtactacaaaatacaactgcatgatacattctgttacttaggaaaaactaggccagtcaggtttcattgttataaatgacaaaaatcaattctgactttaagaaagaagtacattggaaacctacctggcagctgatagaagtaaaaaaaaatggatggagaaattggcttggaaaaaaaaccccagccgaagagatgacctttagcagccaatgcagtgtgttgctacattcttggctgaacactggatgccactcatgaagccttcaacaccaccaccatgctaccacccctcaccaccattccaacaaccagaatgaattctaaccctctgtgttcctttgcctcactagataaagattcagtgggctttggggggctttgcgagagttcattgtagggatctgagagagcaagtatctggcattttggatttctttggtagtacgtggagccctatgtctcactaagagtcacataatggccaattgcctgaacacagggttcagagaatgggctgtcccacccaaaaacacaacccctgatacatcctctacaaagtgcaggcaccttctagaaatagacttattttgatggtattgtggaaagaaaacatgcagcagatatgagtttctaggaagacttgaaataaaggcagatatatccagaacatcagaatgagattttttaatggctaagtatagggtcacttttggcaatggttacgtaagaaagcgatatcaaaatgtatgcacagctgtagataattctgtttaagtggaatgcagattctgcaatgttcaagaagtatgattgtcatttgtaaggggttttcttcaatgtctcctatttcctggcttgattttgcagagactgtcacatgtacataattgtttcaaaataacacaacaggctcatgatcatttagtctacgtttctgtggactaaatgccagcaaaggtgaagggaaggtcaaattttcagtaccttccttctgcaggatgggagctgaggctcatgctgacaattacttctacttcattctttatctaccagaggattctatcagataataccttctctgtgaaaccacgacttatttttctatgatgggcccatttctcctctctttgaacctcagtaattttataaaataattttgtttcttaatgtttcatatttcattgtctatatcttgattctctcagagaattatgaactgtgtgaaagactatattatttaggcaaagttagacattctctattcctagtttccttattaccttgtccactatgacattgtttctctagctgatttccaagtcacaagtctgtaggctcctggggatagaaatagttgttgttttttttaaccacgatgagataccatctcacaccagtcagaatggctattattagaaagtaagaaaataataaatgctggtgaagctgtggagaaaaggggacacttatacactgttagtgagagtgtaagttagttcaaccattgtggaaagcagtgtggggattcctcaaagagctgaaaacagaactaccattcaacccagcaatcccattactgggtatattcccagaagatataaattattctaccacaaagacatgtgcaaacaaatgttcattgcagcactatccacaatagcaatgacatggaatcaatctaaacgtccatcaatgacagacttaataaagaaaatgtggtacatgtaccccatggaatactatgcagacatataaaagaccaagatcatgtcttttgcaggaacatggatggagatggaggccgttatcctccaccaactaacgcaggaacagaaaaccaaatacctcatgttcacacttaaaagtgggggctaaattattagaattcatggacacaaagaaggaaacgacagacactgggtgttgctacttgagggtggaggctggaaggagggagaggagaagcaaaaataactactgggtactaggcttagcacctgggtgataaaataatctgtacaaccaatccttgtgacatgagtttacctgtataacaaacctgcacatgtaccctgtgaacctaaaataaaagataaaaaaagaaatgtaataggtttgttatctttgtccatggtactgaaaattgaaagaaccaatgagaagagaccatttgtttatcttaagtgagcttgacttatacaagatgtgaacaaaattcccatttacttggtaaaattattatatttttggagttccaatgaaccttgtgtgttattttatttatttatgtatgtatttttgagacagagtctcactctgttgcccaggctggagtgcagtggtgcgatctcagctcactgaaacctctgcctcctgggttcgagcaattctcctgcctcagcctcccaagtagctgggactacaggtgcatgccaccacacctgactaattttttgcatttttagtagagacggggtttcactgtgttaaccaggatggtctcgatctcctgacctcgtaatctgcctgcctcagcctcccaaagtgctgagattacaggcgtgagccaccgcacctggcctcatgctattttattttaagaagttaatcctaacatgccatttgaaaaagagtgccacatcacctactctttaaaaatggaaaaataaataaatttaaagattgaatgcaagcccttaatataagaatgcatgtcattctgatctattattactctcctgacaaagatctgcagaagagagtgatatttataaataaataccatggtgtatcttttccaattcacttcaaataatgatggcaagtgagacactgttgcaaaatccatttctatcatttaaggcagcatatgctagagacaagacactggattaggagtcaaaagacctgggttcttttttttttattcaataaatatttactgaggttttatgatagatataagttttaacacaaccaaatacttgctgtgtaatattggcaaattactcaaccactctaaggctaggtttctgcatttggagaatggagagtatgccctgccttgttccacgggacagttagtgagagtcaaatgagacacactgtatgttgaagtgatttgtatatggtaaagcactaaataaagttatattagttataataaattagaaaaataggtcagtgcaaaaataatggccattccctttaatggcaaaaaccacaattacttttgcaccaacctaatatgtactatagttattgctctattttgaatatttgacccttcaagccccatgttgaaattttatccccaatgttggagataaggcctagtgggaagtgtttgggtcacgcgggtggatccttcatgcatgtattgatgccatcttcatggtaatgagtaagtacttcctcaattagttcccctgaaaattgttttttgttttgttttgtttttgtttttgtttttgtttgagacagagtcttgctctgttgcccaggctgaagtgcactggccagatctcggctcactgcaagttctgcctcccaggtttacaccattctcttgcctcagcctcccgagtagctgggactacaggtgcccgccaccatgcccggctagttttttgtattttagtacagacggggtttcaccatgttagccaggatggtctcgatctcctgacctcgtgatccgcctgcctcagtctcccaaagtgctgggattactttgggagcgtgagccaccacgcccggccgaaaattggttttaaaagaagtgtgacacctctttcccctctctccttgttttcctctcccaccatgtgatttctgtgtagtcggctccttttcccctttcatcattagtggaagcagcctaaagccctcactagaagcagatgctggtattatgcttcttacacagcctgcagaatcatgagccaaataaaccatttttctttataaattatccagcctcagttattcctttatagaaacataaacagactaagacaactatagtatattagtgcaataaaattatatttattaaaaagcactgtggttatctattggagccaattcctaactttcacaatttcagtacttccaaaatactgtaataactcatagcaatgtcatacatttgaattgttctttaccatttcagagtgcctgcaaataattcatctttgatctttccaacattaaaaagtgaaacaacattctttgctttatttcttcatgcacatatttctaggattatattttctatatagttacataattgtttctaacctagagctcaagtagcttttgaatggtacttggataaagatgaaattttgatccaatttatttctactccaatttcttgaaggttcactataatgataaatgagacgtgagagacataaagagctgtcagatcagttttatttctagttcttgcaaaatgcccaatgacagtagaaatctatagcagtggatctcaatttttttggtcctaaggctgttttactcttaaaatttattgaataccacaatgagatttcatgtctgtaggttatatctattattatttattgaatttttaaagatgtatttattacttcattaaaaataacaagatacccattatattttaatataaataataatgttattaaaataaccatattttccaaaacaaaaaacagtgagaactatgactgtgttgtttttgatttttgcatctaaaacacctgttaaactaaggtctggttcaacagaagacaatgaaatcatctaatccgccttcactgtcaatctgataccatacattgtttgaagtatatgaaaaatatctagcctcacacagatacgtggttggaagcagttgtatcttgccaagcctctgaaaaggttttgactacctccacaaatccatcaaccaaattttaaaatggccactgtctgagtccatatttacattgcaatatataatcatggctttcttttatacatgctgatttctctagcaagctactgctccacagcaatcttggatttctctcctgaaaattcgctttccttctctatcacacggccaggctgtgcattttccaaatttttatgctctgcttctctttcagtcataaatcccaactttagttcactcctttgctctcatatctgatcataagctgttaaaatcagccatgcaacttctttaatgctttgcttagaagtttcttctgccagattcattaaggttatcattcttaagttcagtgtcccacaaagccctagggaagggacaccatgcaggctaattctttgctactgtgtaacaatgtgacctttgttccagttcccaataagttccacatttccatatgaggcctagttagcctagccttcactattcatatctctatcggcattttggttacaaccacttaaccagtttctaagaagttttaaagttttcctcatcatcctggattcttctgagccctccaaactcttccatcgtctgctctttacccagttataaagccacttccacattttccggtatctttatagaaatatgtctctgctcagtaccaattttctgtcttagcccatttgtattgctataaaggaatacctgagattggataatccataaagaaaagaggtttatttggctcacatttttgcaggctgtataggaagcatggcaccagcatctgcttctggtgagggcctcaggaagttgccaatcatggtggaaggagaaggggagccagtgtgtatagattacatggcaagagacaagcaagagggaggtgccaggctctttttaacaaccagttcttatgggaactaagagtgagaactcactcccaagagaatgacaccaagccatttataagggatctgccctcacgatccaaaaacctcccgccaggccctaccttcaacattggggatcaaatttcaacaagagacttggtgagggccaaagaaaccgtatccaaaccataccagctcgtttgcagtgtagggggtgtaagtgcaaaagctttgaagtcacacaaaactcctaccttggttcaaactggtttaacaggtttgggttgtgtgcccttgatctgtttacttcaactataagccacagcttctgtttctgtaaaaagagggtaattattccaactttactggattattataaaaattaaatgataagtgtaaagtgcctagcacaggtactggcacatagcaagaatataaaaaatagtgtctgtccctaaatgtatcatattttcccacatctccctcaaaatagaaggcctggaatagccatctcagctcacctgagagtaagaccaaccttagagagaaggttctgaaattaaaactcatgggatctaattttaaaatatgctattctatttttatatatacaggatttattcagtcatcattcccatacatttaatggtatttatagtatcatagtccaacctgaaagctatggtagatttgaacagaattatccaatgaaccttcatattaaagaaatttcatgagttgttcttgatgacaaacagaccaaactaataagctaaggcagtggtagattattctattcatatctcattttataaactgatattaaatatactaaacatactgaaaatgttttcttaaagcctagaaagtagttattcatttcaaattatctcacattataaattcttttcaaattagttcaaattaaaagttcatttcaaattgcaaatgagttattcatttcaaactgaaatttatttcaattatacttagtgagcacccatgctgttaaatgtcattgtgcagaatccaaaaatgatagcatttttgcctaacatttaagtttttttcttttctttctatttgctaatagcatggtttgcctagaaataaatttctgatttcctatatcgctgatatgtgttttttaaaattaaagacattgacacctgagctttgtgtcttttctactattcaagagagaatacaaataagtatcaagagtctgaaactaaagtagctgcctaggaattactaaacaaattcttttgcacatgatctgatattttaaatcatacagaaatatcactggaatagtccccttcttagactggcagatttttgacctgacctcgcttaaccctgcttcttgtcttgtcttcctagactcagaacattcaatcccaactactttttcttgctgctcatctaacaattttaatttctcaacttacaggtcacaaggaagtcttaataaaatagcaagtatgtgctaacatttatttagtaccttgtgccttaaagtattccaggaactttatgtgtactaaatcatttagtcatcaaaataactgtatattattcttttcattttatagatgatggaaccaacacagagaaaataggtcagaaagggttatgtcagaaaaacagaatactctctaggtggtgttggggccgagaaaccaatatcccaaatatggcactctgacatgctgaactaaagaagaaacctcaatgtctctgtgaccactcccttcccccatctctcattctctgtgtcttccaaagcacagaatgaagttgttctctgaagtttccttctctctctaaagtctggacccacataagaagaaaaaaaaaccctatgaacccttttctgagttttcatgaactgaattcatatcacagaaagacaggctgaagtttgtcaacacacttgaacagacatatatcccaagccattgtcttctctgtggacccaacaggctttgtactggccattgtacatgctctaagtccactgacttcctctaaaaatcattttctatccccttaaaaatatcgatacttcctggactcccttttccctaagagcaagggtatataactctctggacctcatatggttgggaagtaatcgctgtgattttcctctgtgtgtagtgatacaaattcgtatgcctttttaaaattaatttgatttttgtcagttgattttcagccaaccttcaaaagatgaaggggaaggtttccctttacccctacagtggttaaaacaaggaatatctatccaaagaatttgttatataggcaatgcagagctgaaaagccgaacaaggggagtgagttaagccagagtttagcaacatcaaaaaggcattactacccttaatttggagagagaagtgaggatgcacagcttctaaatctcagggacctacctcacctcactggggagacctagaatcaggcaagggcagtctggtgagatgggaaaccatccaagagatacatacagcccaaagagatgccatcagaggagagggaggagaaagagaaatagcctggctataccctttctcttgccctccagtacctttcctttgcctgttagccaaatctgtttcaaacccatctgacttacgagcgtgaaacatgcagggatagtcctctctgtgatttacagcagaacaatagacgctcaaggaatcaatctcgtagcaaataggaactaaggcttaagtaacttgcccacgatcacagagctagaagtccctgggttgttcttcagggatcatgtgcgctgaacatgggagataggtcttggaaagtgacattagtcacattctgacatgtggttttctctgcccatatatatcataggataatttcagggaaatgtgtgcccaccaatatggtgggagagactttgtcttttgagtataggtgaatggactaaaaagtgatgagaaaaggtctgaggcctccaagccattttcagtgtgcaagtataacttcgggcctgttcaaggtaagtgaaagcaagtgatgcaggcaagaaataacacacttttgcactggctctccgttgataaattctagctgtttctccatagtccttactttctaggtggaccttgcaaagcacattagactagattgcttttcaatgcacaaaacttgtttcccccaaaatgattctaattggaagtgccaatactggcagaaaatgtgtgcaggtactagcctttaaagtgctaatgcatctcttaccaatctacgaagttacaggatggggcatgaaaaaatatatttgacggcacaaaagtatgaagcataggattaagtaaagcagattgaatatgactgttacgggctgaattttgtctctctaaaattcataacctctctaaaaagtcctaacccctagcacttcagaatgtaactgtatttgaaaacaaagtctttaaaggggttattaagttaaaatgatgccatctgggtgcggctgaaatcaagtatgatttatgtcctcagcagaagatgaagagatactgtgggcacacacggaccatggaaagaggcagtgagagggtggccatctgcaaggcaaacagagagggtgcaggagaaatcaaccctgctggcaccttaatcttgaattcccagtgtccagagctgtgaaaaaatacatttctgtatttttaagacacccaatctgtggcattttgttatggcagaacagacaactaatacaataccaaagaagcaacatctagaatccctcaaaatgtgaggcactattgagggctggagaaactaataatgacacattttgtcatatagaataatatggctgggctgccaggaccacaaagctatccacttggaatgagaagttagagttagatgtgcaccacaaaagcacaaatacatttgttttctccccttcatggctgcccacttaattcaataagcattttattgtgcatgtattaggcaggcagtactcttgcaggttgtaatctatgaacacctgattgctaaatagtaccattatgacatcatagaagactcctctttaaatgattgcttattgttttctttttgctcttttacatggagtcttgctctgtcaccctggctggagtgcaatggcacatctcggctcactgcaacatccgactcctaggttcaagcaattctccctgcctcaggctccgagtagctgggattacaggtgcctgccaccacatccggctaatttttgtattttttagtggagacagtgttttgccatgttggccaggctgggcttgaacccctgacctgaggtgatccgcccaccttggcctcccaaagtgctgggattacagaggggagccaccgtgcccagcctgcttattgttttcttattggtggaaataaaattatcccagaatgccaacactcctaaaggaggaaaataattcagatcctcattgcagtagatttaaaaccactcttttgtaatggaaattgtctaaatctgctccatggattcaacaattctttgctgacatgcctgtaatccaggtagctacttcagaggctgaggcaggaggatcccttgagaccaggagctcaacaccagctaggggggaaacaaagaaaagtcctacaaatgtgttttggcaatatggtaaacttttggtatccggaaatggatttttaacccctttctaaagatacctaaggcggaagaataccaattttcttagttgacatataaaatacaatactgagtattgctagaaataacgttttgacccaaaacagaaaaatagtcttgcagtttgtctttgtctattttatgctgctacaacataatacctatgaatgggtaattgataatgatcagaaatttgttggctcacagttctggaggcagggaaggtcaagatggatgggccgtcatttggtgaaggccttcctcctgtatcattgcatggtggaagagctaagagaaggggagaaagagagagagggaaggaaaggaaaagggaaagaggcaagaaggagccaaactcgtccttttataaggaaactgtccttttgatagggactgcacatttgtgatagcaccattaattaattcatgaggtcagagctctcataactgaatcacctcttattagggcccacctccacactgttgcattggggattaagtttccatcacaccgtttttggggggatacattcaaaccacagcattgttacacacaaaatatttcatattatatgaaatatgtcacttaacatttttacctgaatgtcaacaacatagagtaatgtagcagtttagaagttattaaataatatcttgaggatatataattccgacacacatgcatattaaagctgactcatacaacacaattgtcacggcgcaaatttaaaaaatgagttaggaaatcccagcgatgggttttgtgtgccaatttatctcaattgctcaaatttctctaattattcatcccaattgtaagccttctaaaaaggaatgcctatgaggaaacttgaaattttcttctcaatgttcttcagtacaacagttaaaaatatttaaagaaatgctgagtaagtaggaaaccctcagaagtaagctgaaaatgaacagtctcagtgggcaaataggtctaccatataaaagctctatttgatgattatctattgtaagatcatctttttttttctgtatggaagtaacaaatttaactcagagaaaagttgtattgccaaattcttgaaattaaaccttagtatctggcaacatttttcctcccatggtactagattactagatttttatgttaaatttaattttcttgaattcaaatgtatgagcttgatttctaaaaaacaaacaaacaaaccaaaaaaccaaaaccctcatatggagaaacatgaagttagcatataaacaagaaaagaagaaactttgatctataaatgaagaaaaatgggttttgataagctctctttgacaggtcaccctccttgggcttcagagttataaaaaaatcgatacgtgagattagagatgtgacagtatttctaaatttctgtttccaaccgtttcatgacttttcatttcctctagaaaagacataggatattaatataataagatttgcaatttgttaaatatcaaatgagtcaacaaatatgaagcttcaaggaaaaggtgacaacaggtggtaccagacatctgagctgcagaacaaagatggttgtaaagtgcacagaactgttacaaagccttaagagctactataatccatgattattaaataacaccacatactatttcaattagcatttgccaagcttgctttccttgtcattggattaaaaattatacccggattttcaagtgtattctatttgtgacaatatgcattgataatttctctcctcacactgctgcactctcacctccgttcccagattagctcctggaactcgagatatttttgtggctagagattgctttcttaatgttagattttccttacaattccatatatagtcaagcattccatgcatggtagttaattgtttgcttaatttggcaactgggatattagaattatgtatcattaggcagtgatatttttgtaaggttgtttgctagatagatcctatttcatttatattaagtcttgggaagataaactttatttttccagagcctagcagtgactgacacatattcgaatgaatgaaggtagatagaaaatgtctatattcatttacgtaatgattagttaaggagaaaagtacttcccagcataaagatttctggcaaccctttgcttatttgacttttcccttcaggcaagttcaaggcttgtgaaattcctagaaaggcgaggggagagaacgcgtgacacagaaaggggccggagttcgggaccctacgcagttttgggacgttatgggcatggagggaaatgtttgctttggaggctttgggtaagctagggatccgacaagccctgggcgcagggaggaacgctgccctccggcctccagtcgcgctccccgaagcccagcgccagcgtcgcgcaacctgccgcaggggcggctcccgggccaggcagccaggcgcgccctcgccccacccgggaacgccaggcccgcgcagggaggggcggggctccatggcggccccgccccgccgcccggagggtcacaatgtagggttagggcggccggcgggcggggctctgcgggggaggagccgccgggcgggggcggggatggcgcgtgggggaggggagggaggaggactcgcggagggaggaggacaacgccattccgggcggccgctccctccgtcccctctctcccttccccaaagcagcccgcggaccggcagcaaaggaacgtgcgaacgcgtgacgccgcccgactggctcgcgctctcccgtgccccggcgtcctccgcccgctcatggcccgggccgccgcggacgagcggcgctgaggcgggccgcgtggagacgtgaggcggccgccgtggccctcacagtcggcgtttcgccgcctgcccgcggtgcccgcgcacgccggccgccatcgccttcgcgcctggctggcgggggcgctgtcctcccaggccgtccgcgccgctccctggagctcggcggagcgcggcagccagggccggcggaggcgcgaggagccgggcgccaccgccgccgccgccgccgccgccgcgggggccatgaccgtggagcagaacgtgctgcagcagagcgcggcgcagaaggtgaggcgagtccgccagccggcgggccccacttctccttccgacgggctgtcctctcccgctgcggccgggcgccccggcctcgccgccgccgccttcccgggcttcctccccggtcacccccggcccctgcccatcgcctcgggggcgtcgcgcccagagcccagctgcgtgtgggaagcagagtgtagtttgcgggcttcaatccacttccttctgccgattgttttcccgtagcagacggtgccaggtattgagagcgaccctcacattcctacagtgctctgtgtggcatcttaatgaaactttattctctccccttaaatgagaaagaatagctagttgtcatcctttctgaaccgattttgtctttcaaaggtagtagtgtaccaggcctgctattttgcaaaacggtctccaccaaaatcgaattacctgcctcgcggggcaggcgtgttgaccaggtggactctagaagtaggtggtttgcttggtttcttttccttttaaggtttccctttcttcttcttcttttctgtttttttttttttttttttttttttcaatatagaaactgtccctaagagaggaaacctttctggccatgttattccaggaatcttttgtcccctaagtttgaccttgttctttcgttcaccctttactcttgcatcagtcacacattcaaatggtcactcactaaagaaaacaattaaaaaactgtttgtgaaactttatatctttaaagtgaatagagatcattctgctattttagattttgctttcagaatcttaagtgcactatcatggcttgcaccatgttctgaagagtagttggccatgatttaacttctttttttaatttttaatttgcgtgaaaagcattttgggcaaaagagtaaaccgtgccttagttgtgttggtattacggggacagttagggtttactgtgatcaaccaccagagttatgtttggtttatctgggtgagtaatgaatgccccaccctgttgtagatttggtgtagattgcaatattctacctgtgcttgactttagaataagacctgttctaaaatgggctgtctacatacagcctgctaaatttttgctttgagattatttttagaattttatgatactgctttaaagtaatcgaagatactcaagtttggaaagcaaggatagtgcattgttattttaggcacgttgggaaagttgtttttgagacttgtatgttagttgatattattggtaaagttagaaggatattgcacactgcactttatttacagtgaaataattcaagatttaataatgagaatttaaaagagtttccttcctaatcctccctattctattttgaataccttcaagttcaatttttaaagacttaaggcttaggaaagagcacatggtcatgtgaacgctaagcaatatttaatatgtatggtaccatttgtttataattgtcttcagtgttgaatattaaagtctgtttcaaagtgagaaataccaatttttcacttcctaagtttgaacaatgggaagaactttgtaagtttaggatttttttattttcatttgattttgactaaactgtattaaataactatgcaggctctattgtatggttcagaggttatgcataaaattgtagaatcaagaatcaagttaacgaaagtgatcttggctgtcgagtccaatttcctactttaatgaatcccctccacacacaaagggagtagtagttaattcaaaatattatcattatgatgctacttttagtatggctgtgttttagatcatttcattgttattggggattttttttagagaaacttttatacttccataatatttagattgttttacagaagaaacacttaaatgtgtttgctttccgtattaatacacgattactttgttactcatattagaactatttaaaaatatttatatggatacaagtaaaccatctacctcgataagttgacagatttaaatccgtcaagctagtaaccaggaagcggacttaaagctggtaactaggaagtgaacttcacacttagaagaaacaaaagtgaaagtctgtttttactcagacactttatgggttatctaaaaggagaggtgtgtagtgtatattgcatagccaacattttagccagttttcttctcaccttaaaaaactgtgtgtacatatgtgtttttaaattttaagtatttactatttaaaatttaagtatttactatttagctatattattttcaagatttttaaaacttttattttgcagatggatgtaagtttttttgttgtttgcagcaccacactacacaaaactttcatgattttttggttcgcctatagaattcattagtctttgtcacaatgtagtatgatgaggcaagaggctgcctttcccttttgatgtgttctttgcttgattgctggagtttggccaacccagggacttatgagatgtagtaaaactgcagaaagctgcttttctgaggtttaggtatttcaggtgaggtgcagttggcagcagatgagttaaattctgtgataattttggttttggacatatatcttcagcctttgtgcttcatgtttaccaaagtgtaggagccttagatctcagaaatttgatacatagattcaagttccaaatgaggatactccacggcgcccccccccccccccccaatctatctaacccgatgaaccaagctaggattctttagggcagttattattgggaggagttttgctcccagggaccaaattaatttacagagtgaaatgaacaggatactatttaattaaatgtatccttctgagttgaataaaatatattgtttcactctagggcttagaacagttctttacacatagtaggactcagcaaatatgtgatgaatgaaataagtgactggtttccaaaaggagtgtagtactttgtttcctaactgaatcttggaatttaaaaattattgagaaacaatgaggctgggcatggtggctcatgctttaatcccagcactttgggaggctgaggtgggaggatcacttgaagccaggagttcaaaaccagcctgggcaacaaaatgacacctgccaggagtggtgtctcaagcctgtaatcccagtactttgggaaggtgaggcaggcggatcacgaggtcaggagttcgagaccagcctgaccaacatggtgaaacccagtctctactactaaaaatacaaaaattagccaggcgtggtggcacatgcctgtaatcccagctactcaggagactgaggcaggagaatcgcttgaactcgggaggcggaggttgcagtgagccgagatcgcgccattgcactccagcctgggcgacagagcaagactccatgtcaaaaaaacaaaaaaccaaaacaaaacaatgaaagcttgaaaaactgtgcgtgctcatgctaggagaataggcagtggtactgaaagacaggatgtgggatagatctcaaccacctttttgtcaccttgggcaagtcattaagtgcttctgaaggttctttcaaagcagtaatattagtatgttaacagtagtatgttaaggctttaaactttagcaacttctttagattagattgtttaatggtcctaagcaagtgttctgtatagggagaataaaaaagaaacagtatagaatggaagcagaggaatctaacagatctacagtcaactttcactgaattcctccaaagatgagggttaggtgggaaggttgtcatagattagccaagttcaagagttaaaacttgaaaaacaatgcagactggattcagggtaaatttcttacttaaaataacatgtattttccaatttaggattatctaaggttataaaactataccatgcagcatttgatagttaacattacttaaatcactttaaatgttacttaaaggaggcattctttattaggaatcagttgattatcttattattagtataagacttgatttgggcagagaggtttccagctgtttattccttttcttattctttccttttcacacctacttttgacttgtagactcacattgtatccagtcttttaaatgaattcacatcatttctaataaatattctgttgattttcttcaatattatatgtatacagtccatatcctttacaaatacttaatattctgacctctttcttgtcattatttttaccacttattactttaagatgacagaatgctactacaatttatgttagtttctattatatattgtttccttataatatggaaattttcttacattcctaagttttataaatgtttcaaaactagatttagatgttgactgtcatgtctttttctttgcagtgaatgatattttatgtcagtaacataagaaccatttgtacatacgatatatgaatatttactatataatccgtgtaaggcgctgtgctgagccttcttacaaacttttttcatttaatctttccaaccaccttatgaagtgagtgctatttttctcctttcttattgaagctgaagaaacagtattggagaactaaagcaacatttcatctctagtatgtattaagggttggataaactcaaaagtcatgtgatacacaagcccctgctcttaaccacaatgttgtatcgttttggctgtccttgaattcctgataaaaccccatttggtcatgttgctttactattttaaatatgtttctatatttaatataataaatttaaacctagaatttggtatacaattggccttctgtatccacaggttctgaatccatagattcaaccagctgtggattgaaaatattctggaaaaaaaaagcattgttgcatctgtactgaacatgtacagtctcattttggtcattattccctaacaatacagtataacaactatttatgtagcatttacattgtgttaggtattataagtaatctagaaatgatttaaagtatgctggaggatgtgtggatgtgtaagttacatgcaagtattataccattttatataagggactttgacattcgcagattttggcctctgggggtcctggaaccagttctccttggattctttaatgagattgcttacaaggtttggtgtgcccatgagggctattaagataaggttagctcataaaatgattagaaggctttctgtgttttcctgtgcttttggaattgtttagtgtaggattatgttgagtcattcaaaattggtggtgtatgatcttttttgatttgaaaaattagatagcgttcaactgaggtacttgttactttgaagatttggtgaacatgactgtatcagggctgagctgctcatttagagcaaattttaggtaaagtttccaaattttgcttattgtcttttaaattttctatcttttctagggtcaaattttaaatttttttagttctagaaaattctaaatttcatttaggtttctgtatttattggtctaaagttttgtcctaaatctgtgtgtgtgtgtgtgtatgtgtgtgtgtgtgtgtgtgtatgtatgtacatatatatatatgtatgtagacatgccattttttttatccctgcttgttttgtcgtcagtagtgtttgccagatgctgatcttatttcctgcttttttttttgagacggggttttgctctctcacccaagctggagtgcaatggtgcaatctcagctcactgcaacttctgcctcccaggttcaagcaattctcctgcctcagccttctgagtagctgggactacaggtgtacaccaccacgcccagctactttttgtaattttactagagagagggtttcatcgtgttggccaggctggtcttaaactcctgaccccgagtgatcagcctgccttgggctcccgaagtactgggcagtttctctttgtatttctaatggattcaatccaaacttgtgtttttgtcttttagaatttaaccatgcacatgtggtgataactgataaatttaatctttttattgtcatctgattatccatttattagtcttgttttctccattcagttttgatggatagaccaaattttcattgtatcaccacccccacccttgtctttaacgttttcttttcaattttggctcttttaattttaaacaaatatatttttataatataaaattttgataatataaaacattaatagcttttttcggtaacataaaaaattaacttttttctccacccatttgccccaaattaggtaagacattttagcatgttttttcttatggtattcctagttttgttgggataatatagaattgtaattctaggtgatgaattttcttagtgttgcagatgcattattagtagctagttttttttaattaactatttaattttaactgtgttttttggtctgttgtataatgctttttgatggtttgatgccactctgctttttttttttttccagataagttaactctctgtgttaccttgtaagattttactctttgtttttaagagttcagaaatttcacttgcgtgtgtttatgtatgtatctttttaatggtcctgcctaggatttttcgtctgaaatctgtgttctcaggaatttttcttccactcttttcctcatcttcatttaaaactacattatttggattttatacgtcacttatctttcttcctggcttcaaatgtttcttctctcccattttgtcctgtatgctgtggtaactttttagtttgattatctagattattatttttgtaatgccagttctgtatttactacccttatatgtggtcagatagtttacaaagagtttgtttttaataatatatatttttagtttggttctgaagtacacataattgaattaattttgccaattttctcatgatcagctcttcctgcaaatatattttcatttatttgttaaattgcttattttaaataataaacacacacgaaccccctatttaaaacaaaagctggaacttcgataataacctatatcccttatcctatccctttactttcatttgagtgtatcatcttgaatcctctgttcatcttcctgttgatttattgcatctatatcaatggctgaaggtattttttttaatgttagttgttttaacttaaaaattttaagaacttttccctgctacaatatctagaaggtagtcgtctgtatttttaaccaagagttttaaagttatatttgcaacattttatactctttttcatctgtgcttgagttttgtatatggtgcgaggtagggatacagttttattttcatcatatacagattgaatctctcatatccaaaatgcttgggaccagaagtgttttggattttggacttttttttttttcccttcagattttggaatatttgtattttgcttacctgggttgggtaaatatccgaaatttgaaaatctgaaatctgaaataagccagtgagcatttcctttcaacatcttgttggttctcagaaaatatggagttttcaaattgtggagcatttcttatttctggcttggagttttgggatgtgcaacctgtaaatgattttaaaaagttcttttgttatccttgctttattgaaaagttaatgctctcttctactgaattgataggccatctttgtcatatatgcaaaagtttaatgcaaaatttttttccctttccttgactttcatcattcattttgtgaatatcatcctgtgttcattgttgttgctttaaaataatctctcatactggaaaagaaagttctttgcctttgttcctttttttcagaagtaacacttgacttttccttagaaattttagaatgatcataccaagctctctcaaatcctctgtctttttgattaatttgattgaatctgtagatccatttgggattattaagatctttatgatacaggatgagcaggatatactatttttattaggtcgtgtttaatatctcttgtatggtttataatttaacacaaaactattgtacatcttttgtttcaggtagttgataatttctgataactgttatatggcagtgcttttaaaaatttgttattggtgtatgcaaatgcagtggtcttttgtatgttaattttatacctagccaccttgctaaatgtttctaataccttttccagagacaattttgtactttctgtgtaaaagatcatatcattaagggaggagaccacgcctcatattgtcttatgcccaatttctgccctcaaagaaagaaaaagtaaaaactaaaaggcagaaatgaaatccacaagcagacagcccagggccacaccctgggcctggtagttaaagatcgacccctgacctaatcagttatgttatctatagattacagacattgcacagacactgtgaaaatcccgatactgttttgttcagatctaattaccggtgcatgcagcccccagtcacataccccctgcttgctcatttgatcatgaccctctcacacgcaccctcttagagttgtgagcccttaaaagggacaggaattgctcaccccgggagctcggctcttgagacaggagtcttgctgatgcccccagccgaataaaccccttcctcctttaactcggttctgaggagttttgtctgcggctcgtcctgctacatcatgattaaaaagttttatgtataatttcagtttttgtgcctgtactttcattttttttcctgtactagcaaatacttccaataaatattgattagaagtgataacaatgagtatttttttgttcttgctgatctaaaaaggcagttacctacttttgtacctcatgcatttctgaaatatttacatgtgttagttgtgcagatttacaaagtaggttctgtttaactaaaagatattgtagtattttcagtcgtgatgcttgcaggtattttttctttgggtactggtgacctttgtttaagctttcaccctaggtatcctgggtgtggtggtggaggggtgctggtagtttgtcagtctcttctctgtcatcctaggaactgtgaagtcaggcagggcactttttttttgtattagtggccctcactaatttccttctccaggggccactccacaattgatttctgccctgatgtgcttagagtaaggtgtctacagggtctttcttcccctgacactggcataattttactctctaatgtcatagaattgctttaagcactgacctgcagcagtggcctgcctttttcctacaatataatcactgatttttgttatgtttgaaggaccaaatttggcttgtgaaagtgagtttaggaatgtcactatataatgtgagcaagtagatgatgtgaaagttgaatttataaaaggatgaggccttgcatttattttggcagactttaattaatttccaaggacatcatccttgtcatgacatcttgttttatgtatgtagtaagtaatttttcagtttttctcttttttgccccttgattaactctgcttcagtacagaccatctgctttatttttagtttttggttctctgaactgctggatattttaaatgcccagcaatattttccttagtcttgttactataggtttagatcagtttcgtataatatggtttttatggactgtcttaattatctgtagtgcttgctaaaagtgcagacttctgtgcctcaccctagacgtattgtttcaagatgttgagggttgggctaaagcctgcttaataagaatcgcagattattcttctgcacttaatgtttgaggatcactggttgaagttaattagtattcttaaaggtaaaagtgccttgagcactgtgtaaattgactgcaggggtcctttagggattgaattatcacaatacaccaaatttaatatggaagcagggtctttgaacggacattgtttttttttgtttcaggtgtttctctccatcagtgcagcaacatgtttccttgtagaggagctgtctcctccctcaggcttttctggccaacatctctatggaaacccaaagcttcaggtggctaggtgggatacttgcccctcttactcctggaggcacaaataagttgaatcgatggattaaggagttggaaagtgattgtacatgctaaagttgtaatcttcctgtttctttctggctgtttttttttttttttttttttttttttttttttggtatgtgcgtgtgtatttgtgtatgaataattcctataggatttttttgtgggggctaaccatagcatatgaaaacttatgtacaacttaaatatattaagattagtattctttgtacaattttagacatgaaatagaatatcttattgtcctggaaatttcctttgttcctcattcatactgtccctcttttctacaccaccccccacccccacactactgctatcttgacttttttcaagttaatgttatcgtggtatgatttacactgaaagtgtgtaatttgatgaatttggccatacagaacatttctgtcactccacaaaatttgtcctgtatcacctttctcattaattatcaacaccgtcattatttcaggcaactgttgatctgatttttattactgtagatcagttttggctgttctgggtcttcacatcgatttgtttataccaaattttttttttttctcgcatctgactgcttttgctcagcaaaaagcttttgagattcacccatgttttattgcatgtatcaatatgtttctttttactatggagtaatattatataaatattctcacatctgtgtattcatgtaccttttgatgtacttttttttttttttccagttttttgacccatatataatgttatgtgtacatttgtaagcaggtctttgagacgtatttctatttctcttgggcaaatacataggtgtagaattgttatagtactaaattgttatccaaattgattgtatcattgtacattctcattagcaatataggagaatttcaggtggtctacatttttgccaacacctggcatttttaatcttttatgttttagccatttggtgaatatgtggtgtacctcattgtggtagtaattgtatatttccctaatgactaatgattttggatgtctttcaagtgcttgttggccagtttgaggatgattttttttaacattgcttctcatacattatccagttttaacactcctacacgataggaatcacagtagctgcattcttccaagtcttaaaatggcaaaaatgtcagagatgtagctaaaggtagaacactccaggaccaagtgctaatatgttcacaaaacaaattgagattgcacaattttttttgtttgcttgtttaaactaacacctgataaaaaggtacattgctgaaaaatgggaactcatttcttcatcatgcctcaaagtaaatattaaatttatctctttaacaattaattgcacacatacatgagaaatctttatgatacatattttattacaccgtgtacaaaaataatttcacattttagttgggttggaagtttgaaaagaacatagtgcagttgcaggggtgggatgaactgtggtgaggtaagtaaattggacagaaattgggcagaaagatacttcctttttttttttttttaacagttttttatctgtctgaagacagggaagaagaggaatctgaattggaaaacccccactatatctgttgggtttttgttgttgctgttcagtctggaaatgggtggtgtgtggtgagaggtcattaggtcatcagggcagaattgtttgcagagctgggagctacatcctcacggaagtgggatagatgtgctggggaggggtgtgcagagaggagccaggaatgatgtaccattagtggccagggcttgttatggtaacaccaatgttgaaaccaactgtgcattcacatatacaaaagttttgtgtcttaattcatgccagaatacatgcataatcaaatgtctcagttaaggtggagctacagaaacactgggctgaatgaagttctggggttttctttgtcttcgtgtgaggcctctgggctgggtctgggtgtctgatcaagaatgccctgaagttttcccatggggctttggagaacggctttggagctgggcagagctgaggatgagcacagaagaaaggaaacgagaaatggtccactacctgaggtttaaaatcctcaatttttggagggaagaagtgacacaagattttatcggtgccacttcaccagcaagaaacctctaaggccagcagtgcctctgcccaggctttgcttacactcactgggctcgctctgcctgctcggcccagcagggtgctctcagctgatccccagcccagatcccacgaccactgccactccgtgctcagcccatggcgggactgggtataccgcatgtggcttccacagctggactccagcattcagatgaggggaacgtggtggaacccagaaactcggagacggcagcaaccgtggagccccaagggggtgtcatagcttctgcctggggagtcccgaggtctgagccaccagggaatgccacagccctctcttgttcctgccgctcacagctccctgaatgggggtgtgttagagcttgtttattcctgctgcgcatggctttgtgaatgggggtgtattatggttctagttcgaggggtcctgatgtttgggcccccagaggggtcgcggctcatcactcccatattccagcaattgggagtgtgtaacagctcttttcatgcccactgcccacagctccaggagccagccaggtgcgtgttacagccgttctttgttcccaccgtttggcgagttctgggtttttgtccagtgaccaagaataatgaggtacgtggacaccagagagtgaggaaggcagagaagaatgttattgagcaacagaaaagctcttgacaatgagaggggacgtgaagtggatagccctctgtgtgagggggccccaaaagctggtagccatctttgcagttgagtccagggtttttttaggtttggaatgaggagatgtgggctggaggtagccttggaaaaggcaacattcaattggtttaaaagcattattcggaaagaaccaattgggaaagagtaggcaaaaagaaaagttttcactccagctgtggactctatctatatctagaacaggcagcttggtaggctttaaactgtctttggtttgaaggtcaggtttcaccagggacctgtccctgcctgcctaggagttggtctactgtggcgcctgcctaggaattggtctactgtggcgcctgcctaggaatttgtctactgtccctgcctgcctgggaatttgtctactgtggctatcagaaacagctctgcgcaggcctcctggggtcagtggacactctctttaccaattttggtagcatcatgcagatttgcagaactggcttctaggcttcttcccaagtgaggcaggaattgaagtcacttagaacagtggaacttacagaactgacagtgtttccattcttgctgggtggcgccaggaggagagcaccagtgtacctgagcatgtcgaactgtagcagagtagctgaaagcagcatataagatgaccctggtcagctctgtggtttctatggtgtaaagtgggtaggggtttcaggcctttggggttacagagatcagagccactccctcaggtcatggggtcctgtgctaggaggtgtggtcctagggctgtgtgaacattggtggggtttgccattactttatttttgtccatcttggtgttggcttaggcaaaccttagggtctgcgtttttttgttgttgttgttatttttgagacaaaggtctcaccgtgtcacccaggctggagtgcagtggtgcaatctggctcactgcaacctctgcctcctgggttcaagtgattgtcatgcctcagcatcccacatagctgggactacaggtacacgccaccaggcctggctaatttttatgacggggttttgccatgttggccaggctggtcttgaactcctgacctcaagtgatcttcctgtctcggcctcctagggtctgcagttttgttgttgttgttgttttggggcagagcttcgttcttgttgcccaggctggagtgcagtggtgtgatctcagctcacggcagcccccacctcccaggttcaagcgattctcctgccccaacctcctgagtagctgggactacaggtgcctgccaccacacccgtctaatttttgtatttttactagagatggggttttccatgttgtccaggcgagtcttgaactcctgacctcaggtgatccacctgcctcagcctcccaaagtgctgggattacaggcgtgagccaccgcaccccgccgggtctgccgcttttgaatgaaagtaaatgctcttccaagcatttcttgcatgagcagaagagtgtgtagaattctctcggtttgctgtctaaagcaagagggctgactgaccactttagggccacggcctccatccccgccacttcccctcccttcccctcccttcccactccttcttttcctgagtgctgatgttgttctgccttaagcttctaagcaggggcatcttttatggtcggggggagggaggtgtgggaggcaggcaggggatgttgcaggagagctactgataacccagggcctctgtcttttccttattgaccatttttatgtcttctttttaacatgttaagattatttcccaatttcttagttgggttatcttcttgctgttgagttgtaggaattctttatattttggttgtcttttatcatgtatatgtaattacaaatactttctcccaatgtgtggcttgtatttgcattttcttaacagtttctttgaagttgaagtattttaatattgattgtttaatttacttttatggttagtactttaaccattttctttttctttttcttttctttttttttttttttttttgtgacggaatttcactcttattgcccaggctggagtgcaatggcatgatctcactcactgcagcctccgcctccctgggttcaagcgattcttctgcctcagcctcctgagtagctgggattacaggcatgcaccaccacgctcagctaatttttgtatttttagtagagacagggtttcaccatgttggccagcctggtctcgaactcgcgacctcaggtgatccgcccgcctcggtctcccaaagtgctgggattacaggcgtgagccaccacgcccggctgctttaaccattttcttgaaacttagtttgtaaattttttctccctgtgttttgttctagaagttttgccattttaggtttacgatccatttggaattcatttctgtgtgtgttctgaggtgtcactaagtcaaggttcatttattgcatgtggaatctagtcccagcacctacttttgaaaaagctgtcctttcatcattgaattatattggtacctttatggaaaattaattgatcatgtatgagtgggtttatttttgaactcagttcctttctatccttatgtggtgccgttctttcttgattactgtggctttgaaatgtgccttgaagtgggtgaatgtaaattcttcaactttgttcttgttagaaatttgttttggctattctagaattttttgtatttccatatacaattctgaggtactttgaacagttggacaaagagccttctggggtttctgagtaggattgtgttggatgtatggattctttctgactgtttggacatctttacagtattttagcctttcaatccaagaacacatatatttctccatttatttaggttttgttttttaacggtttaaaggtctttgcatatcttttgttacagttgacttttttgatgctattgtaagtggtattttttatttttatttttattttttttgagacgcagtctcactttcactgcaaccgccgcctcccaggttcaagcgattctcctgcctcagcctccctagtagctgggactacaggtgtgtgccaccacacccggctaattttttgtatttttagtagagatggagtttcactgtgttatagccaggatagtcttgatctctggacagcatgatccaccagcctcggcctcccaaagtgctgggattacagttgtgagccactgcaccctgccagtggtttttagtttttattccaattgttttttgctggtatatagaatgtggttgatttttctgtatgaagcttgtatctgcgactttgcgaaattcacttattctaataaatgtatttaccacttttattcattttaaaaattgtgctttttggggtattctctaaaatgtttaatagaagtggtaatgacagacatctttgtcttgttcccgattttgtatggaaagcagtcttttactactaagtatggttttagttgttgcacttcttattttgttaaaaatgtgttattgttaatttatacttctagatatactacagcttaaccattctacagttaaactatttgtttatatatctttttatatatttatggtccactgtgattcttttctgtgaaattgacatttgtttctcttgcctgttttttcttttgggctatttatctttttctttatgatttgaggtagttctttatggtttagatactacttttgtttttctatttacaatagtccacgtttactctcatggaatgtgttccaagacccccagtggatgcctgaaactgtggctagtattgaaccatttatagagtatattttgaaagagactacattcacataacatactgtatatgttttcaaaatatttgaaatagtataccatatatagtatggttcagtactatatagaatatagtatatatagttttttcttatctatatatacctgtgataaagtttaatttataaattaggcactatataactatatagtacatatagtttttttcctatatatagtatctacctgtgataaagtttaatttataaattaggtaatttataaattagtagagactaacaacaataactagtaatgaaatagaacaactatgataatataatgttgtgtgaatgtagtctttttcaaaatatccgataactgagatggctgctgactactaagtgggtagtatacacagtgtggatatgttggacaaagggaagattcatgttgtgggtggcatggagtgagatttcattatgcacagcactcagtcagaatagtgcacaatttaaaacatcgtttctggaacttttcatatttttggactacgcttgatcattggtaactgaaacttcaaaaagtgaaacgagataaggggaaactactgtatatgttttgcaaatattttctgttttcacgatgtctttttattctctttatgtactttcatgagtagacatttttatttttaatttagtttcatgtataattagcttcctttaatatttgaacttccatgtcctgtttcacaaagatagtctcatttattgccctctaagtgttttcttaatttgtcttcatgcagggtttaagtttcattccacttgggtttgatttttgcatgttgtttgagtagatgtcagaatttttcccctctggagaaccagcgactttattgaacagttcctccttcccattaatactctgcctgacaacagtatgtatactttttaaattcttcagttgggaccattgtaaagaaaaacaggtgtcaggaactttcgcccttgaattaaaaaatatatttttgagacagagtcttgctctcttgcccaggctggagtgcagtggcataatcatagcctgcttcagcctcaaactcctggacccacactatcctccctcctcagcctcccaagtagctgggactacaggtgtgtaccatccacccagctactttttagttttttttttttttttttttttttttgtagagatggggtctcgctctgtttcccaggctggtcttgaattcctggtgttaagcaaacctttcactttggccttccaaagcattggcattacaggcatgagccactgtgctcagccaaattaaaatatttttattatggttttactgaaacttgtttaaatataaactaggcatacatttattatgttctgttgggtagctcttatgtaataagatgaaaaaccaactactaacttaaaggtaaccaaaactacaaaactggagaaattcagaataaaaaggttagcttaatttgacagatggcagtgttttgcagaagctaatttggcatttgtggcttcaactaaggaaatcggtatatgtatttcaggatattgtaatatgttaagcttttggaagtaaattttatttctgttgtcaactatactgcatttctgacttgatacctaattaataaccattattgtagagtgagtggtatttttggtctttttattgtaaaactgtaacagatatgctctcaagtgtgtttttttttttaatttttttttcttaagctatagctcagtaaatgccgatatttccatgttgaactgaacaggttgtgtgatttaatgtagagcaggatacacttgctgtgaataagaggtaacaattatagcttacctataagttagcgccaaataaatattcatcagaacttgtgagtactttgccttgtgtacatatttgagtgcctgggcaatcaagagagtgacatactatgcagcgtgataactgcttttgtagacattgtgaaatagtattcttatactgaagtaataattgtattctaaatattgctttattgctagtatgtgtttctgcttatctgtgggaattttccaaggtttgtctttgattttctgatttctttgcaagctttacctttgagagattatatattttccgagtcatatatgttcattactatcaagtatgtgtattgaaaataagtgtaatgttacatcttcacataaattctagttttaggttttcaattgcatgtgtacatttctgcttagtcatcactcagtatcatgaccgttcatttatgtattctttgttttaagcagactgagaaatagataacatacaaaaagcttttaaattggtagtggctagagccagaggtgcacagataatattgaaagttaaataaagtatttgtaggtagaactaagaggatctaggaagactaggaaagatcttataaaggaggtaatagctgaaataaactgttgaagatttgtaggcaggtcgaagtgttattccaagtaaagagaagtctatgagcaagggacaaatcttcaatgatttagtgccttctgttatctacacatggttttatttggctgagtgtgatataataataaatatttggtctttttcccttgttcctggcatggagcccctaaagcctttggaatttactctctagtctgtgctaatcagatgagtggcgtgggtctgggtgtttggggaggagaggctgtgtagcttccacttcagggtgggtactctttaccactgtagttagagggtgagaactttcaaccccagtccagcatccggggagggaagaggggctgcagattgagcccaatcaccaatggccaatgatttaatcaattatactttaatgaaatctccagtgccgtgtgtgtgtgtgtgtgtgtgtgtgtgtgtatgtttttttttttttttttttttttccttgagacagagtctcactctgttgcccaggctggtgtgtaggagtgaagtggcacaatcttggttcactgcaacctccgtctccctggttcaagcaattcttctgtcagcctcctgagtaggctggactacaggtgcatgccaccgcgcctggctaatttttgtatttttagtagagatggagtttcaccatattggtcaggctggtcttgatctcctgacctcaggtgatccacccgcgaaaggctcccaaagtgctgggattacaggcatgaacaattgtgcccgaccccttatatccttttaataagtgttcagtaaatagtagttctatgataatgctcagcgtatatggttaactttttcccctaattctttttttttttgagatagagtctcgctctgtcgcctaggctggagtgccgtggcgtgatcacggctcactgcaagctccgcctcccaggttcacaccattctcctacctcagcctccccagtagctgggactacaggtgcccgccaccacgtccggctaattttttgtatttttagtagagatggggtttcaccgtgttagccaggatggtctcaatctcctgaccttgtgatccgtctgcctccgcctccgcctccgcctcccaaagtgcttggattacaggcatgagccaccgcgcctggccctttttttctcttaaaactgtagaattatattattaatacactgttagtatacagaaattgttttcaaggaatttgtttcagggtccagtgaggacaaagaaaggacaaaaagtagaacaaaggagatttggtgtaaagaagtattgactaggaacagatgattggctgctagagggtaaagagaactctaaagtaagaaatgaatttgggagaggcccttcagaagccccaagactctgagagattgggttcttgttggagaggttgtgaatggagcccactggatggcagagcagtttatagaagtgctgtagcttgggacattcctgccagtagctcttttgaagtggtgtagagtatgtgctttatcgtatctagatgaatggagtttccaagagaccataggacatattatataagtaattagcatgaccaaaaactgtatttgctttaaagaattgtgacaaatataactgctaggaattatatagtattccagtttcagagttctacttagagcacgtttattttgttttattagtataagggagtttatttttggattataagctaattaggcaaacaagtacagaaactagagatgcataaagatttaattggacaagagagctataataggaatctgattattagcatcaacaagttaaatacatattttatttaaactgcagacatagtgatttaaggatatgatttgattcataaaagttttgtttacctacttgttttccagaatataggcactctaatttaaaaacagactgtgttccaaaagattttgcaagttgggtttttggaactgaaaatacatgttcccatagaaaccatgtttcctggtggtgtgttcttatttagaaatgtaactctgtgtgaacttagcttatagtgctgagtaacagtattttttgggagaaatacatttagagtttctactcatgatgtatttattttatctactaattaatagggatggggaatactcttttacattgtaattaaaaaaattttttttaagacagagatttgctcttgttgcgcaggttggagtacaatggtgcaatctcagctcactgcaacctccgccttctgggttcaagctattctcctgcctcagcctcccgattacagggattacaggcatgcgccaccacgcctggctaattttgtatttttggtagagatggggtttcaccatgttggtcaggatggtctcgaactcctgacctcaggtgatctgcctgcctcggcctcgcaaagtgttgggattacaggcgtgagccactgcaccctttttttttgagatggagtcgctgttgcccaggctggagtgcagtggcgtgatctcgactcactgcaacctccacctcccgggttcaagcaattctcctgcctcagcctcctgagtagctgggactacaggcgcctgccaccatgcctggctaatttttgtatttttagtagagactgggtttcaccatattggccaggctggtctcgaactcctgaccttgtgatccacccatcttggcctcccaaagtgctgggattacaggcgtgagccactgcacctggcccagatggggaatactcttaagggtcataaacatgatgcagatatggttgaaaggttgggtgacaggtaggaaaaaggactctgtggcaagggaggatggaaaccatcatttatctaggactaactatatccattgttctttgctagctatttctcataaagtatctcatttcttttttctggattgcatgaatgcttaatgttttagctctggaattctataaaaagtaggaagagacttaaaatttagaattcttggcatttttaagctttaatggaaagggtataccttcagatttatgtgcccatagaggtatatgagtaatttattttaatgctaaagtgctgttaatccaaaaagattgagaaaaacttcaatctgtgacagtaggatatgcagcatacctgaaccatttgttacccgccaaaaacttgaaaaccaggattagttgcctggtgagtaataaacaactcttcaagagaatgcaggttttggtcagtaggagttttactacttgtcacaaataaggagaatacttggagtattctttagggcattgttgcctctagggaaagtgacagggaggttttatggggtgatggagaggggagagggtgtgacatcacatgtagaggaggggtcccagtggtgcaaatgcagtgagtcactatgtcagcaggtaggtcacgtgttatggtaatgaagctgtagttcccccccagggtgctgactttagcatgataatgaggaaagttcacttgggttcatctgcatgttgcgagggtctgtcaggagctggctccaactgactaggtgagagctcattcctcacagggtttgggaaaaaacaggtggcaaggtaggaggttgtaaacaggccagttacttaagttgattaaattcctatagtcccgggggaccctccttgtctgcttacacattcatgggactgtcatatagattatttgcaatagggaatttcagtaatattatattttatacaaaccttcaagtgagattgacaggaccagaactgggaaattctagatggaatgtaggagtgtagaaagtttgcttagtaagtgggcctgacttatgtcatttagaagaattcttcaatttagaagaattagaaaatgtgcttattagttggcctgatatatgtatgcttctcgttcctgtatgagagggaaaaaaaaaaaaaggcttctctttacctttctaagttctttggctggactagaaattaaattgacaagaggcagattaacaggagaaaacccattttaattacataggtacttacaggagtcccacaaaataagagacttgaagaagggtcacatgattgaagcttatgtagcatccagagctacaaaaagtgataggggtttggggcttctgggaggggtggcaacacaagttatgagagggtgggggaggaaatgtatggtgaataaagggtgtcttgtgtagataaaaagtcactcaagtaataaaagttgttgcaaccctcttgctgatacagatactttttctaatgtagatttcctttaaaaatggattttttttcacaaaaggacagtttttcaaggttactcttgtgtccgcagtttctcaaaataactacctcaaaatatgccaaagaagtatatttttgggtggcatattctagtcgcctgcagtcttatttggaggtggtgtgtcctgagccccagcattcccatctccaataattagttagtgcctcttttctgtgggataagcttgtcttgtgatatggcttgttccagctcacatctgcaggctctgctgtattcatttattcagtcaatgttgattgcttgccatgtgccaggcattatatgtatgtaccaggagtacagtgatgaacgaattatggtctcattgataactttgaaatgattaacatttggtgcctagcagtgctttagtgcacgtgcttctgaagtttaagagttcttgtcgtctttggatttaccttgtgattaaccatagtgtattattataatttgtggtgagtctcacagaaggcacctacatgtgcagagacctttgcattatgaaggagaatggtgttctgtagaccctgaatgaaagagagggaagaggaatgccagggggaaagcaaagcaagttagtgctggggacagaggtagggactctagcatgcagaggtcctttaagctgtgaggactatactataggaaaattcctcagacaagtcatagaatattacagttgagggaaatgaaagatccggcttacacattaacaagaaaaacatgactcaggagattttttcttcttctttgctttctggctatttagagactggtttggacttacaaacatgaaggatgtgttatgtacttgaaattcttggacagtgagtattagaggtttcttatggtaagagaacatgagctagagcagtgtagtgttagcaggtagatgcagaggtttttgcaaaatcaggtgtgtgtgtgattactcactttaaagacagtataatgaattaatcttgtcattgacaggtaactttgaaatgcctacatttggtgcttagcagtgcgtgtgattctgaagtttaagaatgtctttggagtttctatcagttttttttttttcctctgttcttagaaaatttggaaggtttttttagaggtcattctaagagttgcgccccccgccttacacctatccccaaggatggaaacctttgactttcttttcctgaaccaagtttcatttatatttggaaatttagctgaaggagccaaggactgacttaatgagtcacccaccgcttaacacaaactgtttttctcctttgttgtcagtggtgctttagttttcttttaccattttataagtattttacatcaacataatagtggatttttgcactgagttttcattttttattgaatctttaatctccaatgttagatatcctagagttgagaaaatatggcaaggacatggaatttgaacgaccaagtttcaaccctgtctctgcacttactaatgtcttgaagtctgtgttagctatgaaatgagagtaactttctagagggtgtgtgggtatgtctgtattaaatgagagtatatattggaaacattggaaacagtctggtatagggaagtttaaaccttcactctgaaagttcgattaattgagtgctgaaataaactgacagtaaacagattagcaagagaaagtgcatacaaatttattgacatggaagcatgggtgggagctacaaaaaaaatatgaggctctaaaaagggccagatgattgaagcctgaatcccctcttcataaagggagaagtggaggatgcaggcaattttagaggaagagtaaatgatttcaaggggagatgagtgtgcctgaagagcagacaatgacctggaacaaaattcttccgggctctgggagagatggtggcaattttttgggaaggtgaggggcagaactgtactgcaaacaaaagttgtctttgttatatagataaagtctctgaggtaagaaatagcccttagaagaatagtcaaaagaataggtgaaaagtctgtctgggtatggtatgcccaggtgcatggcaatttttagttttctttcctgctataggagttaatcttctctggtttatatagattccagggaattatccaagacaatttcgttccttctggatgaacgtccctcagtcagataagggaacttcagagaaaacctctccctgtgctttggaagggaaaacggggaggcaggagaatgttggagagagaccttgcttctgagtcctttcaattgcttttgttcagagcactcagcaagccagaatgccatactttggggcattgttttcgtaacctcaacattgatatacagcaagagtataataaattcatattttcttgccttgtcttgggccagtgatccctttttttgcatcctcaaaaagttatactgatgttaaatatgccctctttactgaaacagattttaaaaatacccagcattaagtggggtcacctgagaagggaaagaatttctatgaaactctcaggtttttaatttatattgaaattaccaatatttccttatatctgaagtgcatagtactgtattttgcacatagtagacacttaaggatgttattgtgcagtaaaaataacaggaaggaatctgaagacttgtaggtaatcttgacttctttgcttattaatttttgtggtgtttgcaagtaactgaatctctttggacgttgcatcttgcccctttggtttagcagtgggaagaggttgaacccacctccctgtacttaactagagaaaaaaaatccatacaaggagcatctcagagcccagaagaggagctctagatatggaagtggattggatgggaaccaccttggatttggaattgctggtcagggagaggaccatatttaggacatttccagttgaggatcagggcgtatcacaggtcagaagtttcataaatgggaaggtacaaaccttgaaaaacagactagggtcttaatcacaacagaaatggcaacaaaacccccacataattgcaggaaatgaaggttcagggtttcaaatacaggaaaaacacaactggaagatgccagtaacaaagggaaaaaaactttgcaaatgaggtggcttctctaacttaaacttaggatttttctcattgctcacctcttcccatttctctctacctaggtttagctaagaaaattctttcactttttttgttttcttttccacctggccttctccccgatcaccagttcttttcattgtttcattttcagtcaagatttatgaaaacatgaaccatactagagatacacctgatttttttctaggatatttgtctgaatttatagtaaaagataaaacagcaaaataacagtttcaaagaccttgctcttctccataatatactcagtattcttattgcactttatcaaaccaccataacaaaccacctcaaaacccagtggcataccaaaatattgtcactcacactcacagatttgctggttggctgggttgacttttttcacatgtgcctcattcttcttaggcaagtgggctaccaagtcatgttcttcttaagcaggttgcagaagttcaactgggctagcccagcgatgcaggtagtttcatgtctgcttgcatgctggctgctaacatgccattggtcaaatcccatcatccatgacaaaaggaaatacatcatgtgtgaggaagtaaaagtggcaaagagtatgaatacagggatgggagaattgggaggctagcataggcagtgtaatcttttctgggatttatattcgtgtttgtattttactttgtggttattaatttgtgtatatactattttgtattctgctttagcgtaatgtgattttgtaaggaaaacttctgtatagattatatatttttcacttaaatagttgtatgtgtaactgagactctgcttctaagttgatctgcatcaaaatcatttgaagtgcttattaaaatgccgatccctagaccttaacccagaccctctggaatcaatctctggggatgaggcctggacatcttcattattagcaaactcatggagtcatccttctgtacattaaagtttgagaactactttcttaatggaaggacatgcatttgtattagtctgttctcacgctgctataaggacatacctgagactgagtgatatggttagcctttgtgtccccaaccacatctcatcttgaattgtagttcccataatccccatgtgtcatgggagggaccaggtggaaataattgaatcatgggggcagtttcccccatcctgttctcatgatagtgaataagtgtcacaagatctgatgattttataaagagcagttcccctgaagatgctctcttgcctgccaccatgtaagatgtgcctttgcccctccttcaccttcagccgtgattgtgaggccttcccagccatgtggaaccatgattctgttaaatctctttcctttataaattacccagtgtattagtctgttctcatgctgctaataaagacatacctgggactgggtaatttataaagaaaaagatatttaatagactcacagttccacattgtcagaggcctgacaatcatggcagaagggaaaggagaagcaacggtgcatcttacatggtggcaggcaagagagcatgtgcaggggaactttccttcacaaaaccatcagatctcataacccttaactcactatcacaagaacagcatgggaaaaacccgcccccatgattcaattaccttctaccaggtccctcccatgacacatgaggattatgggagctacaactcaatgtgaaatttgggtggggacacagccatttttaaatttttataattaatggccatcaacatttgtacaaatgactgatttccttgggtactaagtaatttttctctgagccatgattgaataattttcagttgaggaaaataatactttatatatgaaatcagatttggagtgctggtagcagtgacattacagacttataaaaattataaaggattttatattaactaaatgaagacattgaattgaataaagataatttctgtaaaacttttatgcctttaattcgtaatgttgggtattgcatggcttattcatgattccattgctatttattagtaattttctaaatgaaagtagtataaaccaaaaagtatcttaagacaagtctcaatcaatttagaaagtttattttgccagggttaagtacgtgcctgtgacacagcctcaggatgtcctgacaacatgtgtctaaggtggttggggtacagcttgcttttatacattttaaggatacataatatatcagtcaattcatgtaagattcacattggttcaatctggaagggagggacaactcaaggtctggtcacagggtggcttccaggtcatcggtagatttgaatatattctgattggcaattggttgagttattatcaatagaaaggaatgtctgggttaagataaggagttgtggagacctaggttttatcatgcaaatgaagcctccaagttgcaggctttagagagagtagactgataatgtttcttaccagacttaaggtctgtgtttatgttaatgctggagaggtatactgaggcatgtctaccccccacttccagtcatggcctgaaccagtctttcaggttaaattttagagtgccttgaagcttcagattttgtttttggtttacggtataaaaactgataggtttaaagataattttatttttctcaattcggctctgtaaatttggcagtttattcatccattttgatacttcctggcattttatatgactttgtttgtgtactttattatgtattttatttttaggtagcttggttatctcagctctgtaaaaccatttttatggaagtgaaattctttggtggcatggcagacactgccaatgcctatccaatgaacattcttttctttttgatagcagaaccctgatttcattttcacagcagcctttgcccacccaaaaaattcatttcccaatctcctttgcagctatgagtggccatgcaactgtgttgtgctttgtgaggcttttgtaagtggaagtttgtaggtggggcttgttaaagaagtctcattcatttgggagacaccttttgtcctttgcccttctctttatcctacctagaacttggacaggatgatggaggaggagaccatgcagtgacaaacattctgatgcatgttccactttaaagacttgatgttgggtgtccctactaggtctggactgcccattgtgtcttctaagttagaaaagaaagacactccagagtattgaagctgctgtttagttgggaatctgttacatgtagctgaatatagtttctatctaatacatatgatttctgtaaaagatacttgggctgcaatatctcttaaacctttcatgtaatttgtttaggactttttagacttctgaaaatacatattttatacataaattgtcaagcatgttttgaaatgcacattttacaatttgatgtcaacaaagctgaatgcagaacattttaaaactttttattttgaaatttcaaatttaaagttgcaagacttagtacacagaacttccataactttttttctccccaaaccatttgatagtaagttgcaggcatcatgcccctttagcacttaaattcttcaggatatatttcctaataaaaaagatactctcttactatactggagttatcaaattcaagaatttaatattaatgaaatgtcattactaagctgtgcatatttatatttctccggttgtctcaatatcctgcataacatttggtatgggatgcagtcagttccccctttggctcacatgcttctttagtctcctttagggtggagacttcacctgcttttcatggcatagacatttttgaagatgatagaataattatttttcacagtgtccttcagtttgggtttgtgtgatgcttcctcaagattagatttcggttgtgcattttcggcagggctatctcacagattatagagtgtcaggaggcacgcactgccattttatcctattattggtaatactaactttgatctcttggttaaggcagtgactgtcagggtttacactgttgttacagtaggtagctagtcagacatgagcagggcagaagggggcctcccccccaggaatgtcaggcaaccattaggcggtggtcaggctgttattaaccatctctctgaaataataattggtcgcagccggtgccagggaaaggcagtctcccaatagatagaaacacctgaaactggtgattagcaacttcctgataagattccaggatttgagtgaatgggctcaagcatatatgcactaagaggcaaaacggtggagtttaactgacatatgacctttgtttaggaacacccaactggtaagggaaaaacgccttaagtgagcacatgcacaatttcagtaaacacactgtgcgtgcagcccctccccagtgctggcaggccactgcacctgtggacagccatcctgtaggaggaatcaggggagaagaaatgcaaaccctggaagcatgccagtgtataaaaccccaagtcaaaggtcagctgttcacttgatctttcaagttgcccgcttggcccccttccaagtgtactttacttcctttcattcctgctctaaagctttttaataaactttcactcctgctctaaaaacttgccttgatgtctctctctgccctatgcgccttggtcaaattccttctgaggaagcaggaagtgagcttgctgtagacctgtacgggttcgccactgttaacacaataaagttattctttctccctttataatttgtggaagagaatttaaaatgatgtaaatattctgttcctgatcaaactttcattcagtagttttatcatccattgaagattcctgactgaattattgctgagataaatgtgaaacatctttttaaaaaagatttcaatagatcctattctattgactaggtttgcttttcctatcatatccattgtgattttttatttcatggtactgttctatagtgttgggaacttcaagaaatacagagatgtaaggaggaagttggtttttatttaagggccatcaggggagagtttgatagtgaaatcctatctctctacctcttttcccttccagtacaatgcagtcaattttataggccaatagcatataaagaactgaagcaaatgggggcaaatgatctattcaatttagaatcttttatgacagattggacagtgaaatgatcttctttttaaagtagatctgaagatctccgtggtataattacccaccgagttatgtcttgccgaaagcatgtcttttccaaaggtgtttctctccttgtgcttaccatcatggataaggccccttttcttgttaggtggcataaatgaggggatgaagaaaaggacagaaactgctaattcagtaagacttattggggagtaatgtagagaagttaccttttcgaaacgtgagaatgaaataagggttctccacagcatgattcattctttctaaaagaatgaagttgtttggcctttctcaagttctttttccttttttactctagtttactttattctgttttttgtttgttttggaaaaccaaaggtgatttgttttcttttcctagtatattttcagagttgagaatataatgattttgggtttttcctccctctagcaccagcagacgtttttgaatcaactgagagaaattacggggattaatgacacccagatactacagcaagccttgaaggtatggcctctgttttatgatatacagtttgtggtatatgctcatctctagtgcgtattatatttgatagttgattttttttttggggtataccatgtggtagttttagagatacaggaatggactttgtaaagtaaaatcctcagttaacacactgcggttttgaggatgttagctttcagcagtctgatgtccatgataccttagagtgacagataacctctttctatatatgaaatgctttttgtgcaagatagtgggatgtgaatcctaattctaatggatggttttacttacgagctgtgattttagagtttaaatgagggttcaaggtggggtgtattagaggatgaggtgtaagagaagggaaaagtagaaaattaatagaagtctgaaaacttacatttttcttctcctgagaagcagagatataaatttgcacccattcagctaattacaccctaagttaaacattcaatttcaaactcttcagtataggcaacaactaaaatgtatcattttggtcatatcttagttggaccttcagtttcacatcgacatccaaatgagtcatatcatatggatactcacattgaaaaagagtgaatgaaagctatttaagaaccagaactgtacagtattttaagcttatttgcatattactactataggctaaaaacaatatagcatttttgccactgcagtcatatacacagctccaatcctttggaacttgatttcaagcctagagttctttatttgtttttagaaataatctattagatgattataataaaagtcattataacaataagtagtaccgattaaacatttagtactaccaggcagtattttaagtactgtatgtgggctagctcatcctaataataaataactctatgagataagtattagtttcatcccctttatgaaaagatgagcaacagagaggttaaagtaacttgcccaggatcacacagcctgtatgtggagaagcttggaatagaaaccaaggcagcctgatcccaggtgccacacttaatttatgcttcttttactagaagctttgcttcaccttattcccccatcaggaaaatcatgaaatagtagtgtttagagcattaatgcggggtgtatgaagccactgtaagtatttggagaggaagcagaagtgctatacctcaatttttatgattatgacgtttagataattgctagtccctttttattctgataaatatcattactaaattccatgtttgttttcagaaactgcctttttcattatgtattactgagtgtgagaccatagcctatcaccttgccagggtaaatttggggaatttgcttttttttttttttttaaacttagaaaatatgtagctcgaatgaagtcttatccacatttcctttgatagaggttgtgtgagcataggtatttttaattttccaaaatttttgtttcagttaccagtagctaggggaaaagagtgtatttaaaccttaattgttgcccattataaatactgacgagaagtctacttttgagcactgtaatgtcattgattaatttcagtacttttaatttgagaacatatttttagctctaaaaagtaaatgaacttcaatttgtgtaaattcctgctgtgttgttttaaattattatatgaggtaatatatgaaaaacacttagcacatttcttggcatatagtaagtgctcaataaatgttagccatcattattgcgctttattttattgttagattacttatttaacaatagtgtatcttacattttggatgagtcacttaggaatcgtctaatgatcatgacagatagcatttttgaaagtggtggtgcctttgaaactgcatccttactccttttgtcactgactgctacaactggaattggggtaggtcttggggactttattctgccagctgctcagtccttaaattttggaatcatcctgatcctacttctgtcatgtcccacatttaataagatagcaataatattggatgctgtcttctgccctttctctcctctagtctattcttaatacatggagtaaactttttaaaatgtaagtcatactatgtcattcctttccaaaacactccactggcttcttattacacccgtgtgcatgtctaagttcttagggaacctacagagccttccatgttttggttttctgttacaaagatagcttcgttgtgaatatctgggtttcctatgttgttttggttaactgttttagagctaacgttttacttgctgtcagttgtgcagagaatataaagatgtaactgggcaagtctcttctcattttgctgttttaaattaaaattcttattctggcatctgctttcttctaaataaactttagaataattttattcagctatacttttgatgagaactatgcaaaatgtatctatttaatttgagcaggattgtcatcttgacagtattgagtatttctgtctagagttctgtgtgtctttccataattccatattatcaagcccttcagtacattttgccattttcttcccatgagtccttgacattttgcttaagtttgcccctaagtatgtatccagcacccagattaaaaggaatatcttttattgtccttgtttgtagaagtactaattttaatacccattttgcactctttcgtatggcaagttccagaagaccttttttagtttatttgttcaaaagtataagtttgtgattcacttttattaagcagataggaaagtaatgaagactaagaaattagagatggatttttacattgtatcagtagttttaattagtaagaaaggtattactattgatatagtatactttatgtatgatgcatttacactataaaattagaatcacatatagattaattgcaaatttaaagcaattttgttctagagagttatggagaatattgtataactttttttgatggataaaattatttcaaaacacttgatactcctttcttgatatttgaaggatagtaatggaaacttggaattagcagtggctttccttactgcgaagaatgctaagacccctcagcaggaggagacaacttactaccaaacagcacttcctggcaatgatagatacatcagtgtgggaagccaagcagatacaagtaagttttctttcttttcttattattttaatagaaacatactgaaaaacttttcttggtgtaatatattaatgttgcttaaggagaggtaaagaaccaaaaaagaactctattaaccttggttctttttaatgtagttgaaaggaacatacattatctttttcagattataaggaaaagattttatgtaagttatatagtttttcatagagcatttcatatagaatttattgttttgaaatatggaatagctgcagatatattcataaaaggaagaactagaatttttagtgggcacagttattttgcagattttaagtgctggtagaggctttagtatttcttttgaggttaaagtattatttctaattactgataggtttaccatttaataaaatttcccttccctttccccctgcttccaaataaagctttggcaaagaagtttattattgtgtaatgaaattgcctttcatccaaaagaaaaaaagaaaagaaaacttggaaaaagtgttttggagatacaaatacgtacatgtggaagattctatgtgggacttaagtttttcttcataatatgaatactttatacttatgtagcgcacagtttttcaaactatgttcagttaccttcatatctcattatagtttaataattgtactacataaaaatagttacttttatgccttatggatttgcaaagtttgattattaacatatatttggagagaatttcttattttgtttatagacattctcaaagttaggaagcaaccagaaaagagttcgtttacatagatgtttattaatgtttattgataaaatattttaatttttagttttcaggataatcttagcatttttgctacatagatgatcttgtgtcagagaaaactagaatactcctgtctcacttagttaataggtgatgggagaatgtttgtagcatatataagatagacctgtttacttaacgtctaagttcaaggcaagctgtgactgggcccccatccacatttctagcctcattttccactgttttcctcctgtcattcaacactgtgataatacagaatggcttgaagttctcatgtactcagtggtatttaatttctctgtctttacatttgctgttccttctgtttgaatgcactctggccttttcctccctagcctaatttgttctggtcttgaaagatttagctaaagagctgcttgctggagaatgtttttcctggcctctagctaggaccaagtgtttctccagcatccagggcatgcttctgtcttaatgaatactctgttattttgaaattatttgcttgaacattattggtgctcaaaaaatgttcactgagttatgtttgataatatgtgcagtaaagctctttcaaaaccaatgaaagggaatgaagttgagaagcttgttgcaaaaagttgaaagagaagtggtataaaggtcagaaaaatgagtacttaataatattttggatatttcaaagttccaagactcgaggggaaaaagaaactagatgggtgataaaagggaaaaggataattttgactaaaatgctcctggtttaagtgaagcaagcaggaaattgactaaacagagatcattgttgttagttgtgaactcttaatatagatggtatacttggtgacatgacatggtatatttatagaaaaggggaaaattaggattatgtgtgtcctgcacaaaagaagatatttgctgtgcaaagtgagaaaatactgcataaggcaaatggttacacctgtttacgattttagatagggaatagtgaaaatattatggaggacaaaaaaaaattttgaataggttcccttagggagaaggcagcctaatttcaggaggcacgtgtctcatttgctgataattaaaactttttttgtgtgtttgtggatctcttgaaaaatattcacgaggtaattttattttccacttgaaataatgtagagaaatgaagtttctgatgtcatctcaaccgattgtcatattgagtaaattgcttgctgttgtggtttctttatccataaaacacataatacgtaatatgtatcaagtgctttccctctaatcagggtgccaattgagatagtgtgtccataaagttggttagaggttattgacagcaaacagttgtaggaatttaatgtggcaattgtactatgatagtatcaaaccagaaaaaaattaactgttggcgtaacagtaatacttttccattaaacattcctgccagtagtgtcataatgcagtgttactggtttaaaactgagaaagtggggagatgtcatgcatttcagcaggtattaaaaaaatactctttaagtgactgtgcagttactgttgagaagaaatgaagtcgtgtatttttaattcttggaagatgtggtaaaacatgagggaaggaaagacaaaataattacaaatggatatacattcaaatgcaggcctctatttaaaaaaatctacctaactgctgtaggaatgtagaagaatagatcagagtgtgagttttcaagggattgttgtagatataaaaaccctttttgagcactttctccattttgtgtgaaatacattgttatttaaaggttgaccacagtttcacttaattctttcaaatatggcagggatttttattttcagtttttttccattcttctttttgaggtataaaatctcttaaaaccagggctaaagcagaaacaaagtcatgctaactttaagtgatacacttggttgcagtgctgacaaaacgtctgtcttctgaaatcgaaatctctaataccaaatacatatacctctttgttgatattagctggaatatcactgtttacaatggactgtttcttttagaaggaataaattttttttttgctgactagaaaaatttagtttttaaactaatatcacatggaagttatatttggggcatatggagaaatttttgtttatgcatacctggtgtgtcagaggctaaactatattatgtcactggatttgaaaaacaatttgtgagccttcctttaatattgaagaagtaaatatattttcaatagttagtaggacaattatatgcctttttggtgtactttttacctttcacttttgagagaaaaaggagacatatcaaagaaatcttgtgctctgcataaaaaagaatttagaagtcgtacacctcatgtctttacttgattacattccatactgtaattctgttgaattctggaaaaaagcccaaatcatttgtactataattagcaaacgtactaggtaacattttttattatttggacctctgttcagatcagatcaaatattatagattgtcaaatgagtgcctgttgtccctggcttaaattgagaataaaattgttttggagttttgctgtcaaaaacacaaatgaaaatgagaccaggacacgatacccggtattgagcattataggtgtgattaatagtcagaggagagattctgccaagtttttgtgtcacggcaaactctgtcatagacatgaccatacagctcttttgcccaatttgaagtctaatagtaatactttttattttgtgaccattaaattctttcgaacatttttaaaacaggaaaaaaacagtatatgctctccagaacaagatgtgctacaattgagcgatcaaaagataagagggatttgggtaggtaattttaacacagaaagtaatgccacatattgactcaagttttagagaaattggtataagacttgaaatgagtgacaggtggtaagactcttcaaaaatttataagccgttttttttttctttttttctaaaacaccttgaatttgaaaagatggcatagaaagggagaaaaaccttgaggttctatcctagaattctagttatggctatcttgcttggccacagtaatagtgatttaaactgtgataaatagatccaattctagtgcttttattcttaggataattctcttatgctaaacagtttaggatattgttaattgaacactgatacttttcccattgcccaagtaacttcagtttttccctagaaatttctaatatgtaaaacgatttttgatgactcacagaaagtcaagatgaagcctaaaaactgagatgctaaatggtgtgaaaattagttccaactgatgggtgcaattaggagcttcagattgattagatgcattttattagatatgaactgtagaatgacttgtataacttgatgaattttctttagttttgggttagaatgatagccatggtctttgtacttttgttgactaacatgggagattaattttactttttttcacaataaaaattgaaaaacatagtagaattaatgacaaaactctggaatgactcccttactacttactcattttccttgcttaccactgctgccactgtgattttagcagctattattaaaaacagaactagaccatttaaagctgagctgttcaatatagttgccactagtcacacatggcaattaaaatgaaataatattgaaattcagtttctcagttgcactttaaatgtttaattctggtggctaccagatcagtgcacataatgctacatttccattatcacagaaagttctaatttacaacactcttttaagagaatctgagtttaacagtgagaatattgaaagaataggaacatctgaaggaagctgaaagcaagggaaaatgggagagtggagtgggaaacaatttatattgtttatgtcttctggcttttaagattcttgcaacatgataccttactatgctgtctgccctttcacttgaaaaaattttgaatatataaaagatatgttctcatcttctaattagtgccattatgaagatgactcaccagtttttatctctattctgtatttctttaacaaatatttattgtctaatatgtagcaagtacttttatagaccattaagaaagcatgcagagcctcagtttacatagaggaaagacagtacacagtaaacaaacagtatcagatagtaataagtcgttcatgaagaacagtagacctggatatagacaaagaagtgatgggggtgtgcttgtgggctgggcataggataatatgtgattttaggtagtgtggaagagctcatatttgaggaacagtagacctggacatagacaaacaagtgatgggggtgtgcttgtgggctgggcataggataatatgtgattttaggtagtgtggaagagctcgtatttgtacagatacctgagcgaagtgtgagcatgaacttttggctctctgaaggttgtgcgtcccagaccagggcctgatggggcagtgtgctggccctcgagatgaatagtgaggacacagccttgttgaagctgaatgagcgagggtaggaatggcagtattctcgtttctgatctcttgctgcacatcctgatgttcatatttgcctttctttcttaagggtatttccattcttctggtggtccagggtattttttttttctttttttttccttttaatagctcttctgtcaatctcccaaaacaaccatttggtttgcagatctgtcagtttttgtatgtagacttttcccttcagttactcctgccctgctacatattcttattgcaacgcttctcaaactcttcactacccagtttttttctgtcttgcactcccttgcttagaaatctttgctgacagtaaatataaacttggcttattttttttaaaaaaagtatttcctcttggtttagcctgtgtagataaggaaaaacaatggaagaactctttttttcttctgaattcaaaatatttacatatataatagttcagctagattatgggccaactaggcttttgtgaacttacttagaaacctgaggttcaagtaagattcacttacataattcacgttcctatttaatataatattttcatgggaaagtgaattatgagttataaacaatgcatatattttgtttgaagtctagttcattgataagttgatgactagcatatattttggagttagcagagaaatgtttggtagttggtgtataagttttactcatggtattcctttgtaagtgaaagatttagtaggatgagtatcacgttttgatatatatttctcactttacaggaaaaatgttttaatttggactctcataaaaatgtagattactgcttagatgcatttgtaacatgattttatacagtggcacccagctaactgttcccatgtgtgtgctgttgaattgtattcacgctaatactagagggagagttggttaaaaataatgtttttagtgttttaccaaggtcttgccttgacacagatatgagaatattaataatgctctggcattgagatggaagttttacaaaggctaattttctgtaactgacttttaccagttagaagttgtttatagccaaagttattctgtttcttttgtaagcatgtgagaatatctgagcgctagtttttattataaattgataattcgttacatgttttacacaaatcattattccactaagtccagaaaaagaataaattgggtttaaccagtctgttgaaataacattttattttcttttactggtcttaaaatcatgtgaatttggtatgtgaggtatctttcaggattgcatttgatatgtgaggcatctttcaggattgtatgtgtggaccgtatgtgagggatctttcaggattcagctatctttcaggattgtcatattgttctaaaataccctgtgaaaagaagcagttttatggattaataggaagatcatggaagaaaattgttacaattacaatgaaattaaaataataagtaaacctcctccattgcttaaaggaaaaagtcccagcttttcagttaaggattgttagtctctggtctcaaccaacttttccagcattaaggactactattcctctataccagggattggaggctcaaattcccagctggggtacaggtgtgcctatatgctgaaccctccgctattggagatgcctggagtggctggagccatttaatatggtcgttctagccacaagcagctttattcttttacacccatgtgaggtacaagatatgcgaggatgcaagggcaaggaaggtaatgtgaatgtgtgtggctggccaagttgggggcgggggcaaaatgaagagtgaatattctatctaaagagagctgctactactacttttattacactctggctttgtcacaatgattattgccatgcaggaatcgtgtaaccaggtcttctggtttttttttttcctcccagagcgtgagggaagtaatacctattattgtacacatacaatctcctaatctttatcttttgccagttatttcaaaaaattttgaatgacattgtaaaaaccaaagaaaaccattttcaattatgatttgtttcataaaaaacatgtctaagaacatggagtagatggtgattcttgttatttttgctctcaggacccctttacactcataaaaattattgagaacctcagagcttttgggtacataaaatttactattttagaaattaaaacggagaaaagcttaggctattagttcatattaaaatgtcagtctattatgtttgaataacatattttatgaaaaacacatttgctgaaacaaaatggttagaagattacgttgctttacattgttgcaagtcttgaatgtctgccatattagaggagaactagagtctccaatgtgcttctgaaggtttgcattctattgcaataagttgttttggttgaagtttgtgaagaaaatctggctttacccagataataatttagaaaagggaggagtattttaactgataatcagataataatggatattctttttaatgctatacccaaacttaacagatggtaatttcttaaagattagttgcaatgtggaattcgaaatcacatcagttattctatggtggtatcaacaaccttttcatgttatgttgcattaaaatccattagtgtttcttgctttttggatggatcttttacccatgcatgagtttgtaacactgtgcattggtaatttgaaaagatttctttttaaatgcttgaagaatgtctactataagaaaaagttgaatttgttaatatcaccactcatatacaagcctttaagtattgagaagatatcaagctcacagtggtagaaacaagtttttcaaagtttagatttttgcttgaaaattccatattaatcattgtcaacagatacatttgttttccttaaagcaacaggctcacttttttttttccagacaacatctgccaaatactgaagtctgaataattctagtttgtagtttgttagtttttcttttaaataaaaattgcattccatgggaaaaatcagtttagcttgtaactcattttacactagttgttagcaacagcatactctggatatatcgcagaagtactttatgtgtacttcttatgttagaattaaacataaatcaaggtttgaggtttaataaaattaggtttaatcttttcgccaagaacataattctaaaagaaactggcttggcttctgtttaaaacagtgagtgtgtatatttgtgactaatacaatgaattatgcaacttggtgctgctgccttgatttgtgctaagatgcagcagttttattcaatatcgttttgcatcattggtgcaaatgtggctacagtacaaaaggcaaataatatctgagtagtattatttttttatttaaggactttcctcccttttttcaaaggggccctggggaccccaaggatcaatggaccatatttgaagaactgctagtaaggcagaaagaccactggatttaagagttagaagacttaaattttgaagcctgtgcaccattctcgcgtcttatgatgtgcttcatttctcagaatttcagtgatttcatttataaaatatatttggggaaaaaacatcttgttttttgcttttttgttgcttgaattacaattgatgaattaggaaaagctgtaagtgtaagttgttgctatttttaaattagtttcggctatagcccatttgttttacttgtcagtcatgatacagtaaacattctagaaattttcaaataaggaatttaatacaggggattaggttctttaaaaaatcactggaaggactggaggaaagctctagctcagacttctgaaatgactcccacatcattgcaggactgaccagtcagggaagcgaccagtcagggaagcggctacttctgtcacaattaggaaagcggcctcttggactactgagttcaagaacatacttctatagctgcagcccaggaaacaggaagccaggattaggtactgcctctgagctatgcctggaaattggaatgcaaagtctagttgccgcttatattccatctcttgacattcttaaagctggaaattggagcctggaatactgtggaacaacttaaatcttttcaatcaagctagagaaaacagccaaaggcaacaggataatggttgccacccccccccccccccgcccccgctgcactctgccttccatgtctcgtgttagtgcattctaatggatgaggcctaagtttcatccaaaaccctaactgccagtgaataaggaagatagtttttctgtttttttttatgtttagtttctataattgaagaaagtaaacttaagagaacgagttaatggaatctgaccgctaattaatcacacacctaaaccctgtttttctgcttctctgtgattttcaaattttttccacttttcattatcctttctctacttagacctaagttctagccattttaataaccaagatagctttcatttttatgaggcattccatacctttttaatcctcactgcttcatcagtgtttatgaatgttcagttctgggttacactcatcttcagctgtggtctgggtggacttggattttgtaaccagacttgtaaaacctttggcctgctgttgcctgtaaagtgattcaccatttcaattactatgctatataaatctttcacattttacttgcctgtatttttggggggccctacttaatacacttttgtgaggttttattatactctctaaagacattaaaaaaaacaccaccacttccttccatgatcaggtattctttctcatattttaaatcttcttacaagctactatttggagaacgtgtggataaaaatagaagtagactctggaaaatatcaatatacattactttttttcattaaatatataatatgcttttctagtatttatgtaaaaccttatagccatatggtaaaataaagccaccttatcctccccatcctctatcctgtttgttttttttttcctcttctaaaattgtatgattacaaagaaaatatttttaacatgtctaaaatacaccaacctgggcaagacgcaaaaccttgtatctacaaaaaattaaaaagaaaattagccaagtggtgcatgcctgtagtcctagctactctggaggttggggcgggaggatcactggagctcaggagtttgagattgcagtgagctgtgatcatgccactgccctctagcctgggtgacacagtgagacactgtctctaaaaaataaaatttaaaataagcaaataactaaaatgaaggcaaaacgtgtccaaaatacaaataagcataatcccaaccatgcaaagataataacagatagtttctctttctgatcatattattttgtaacctgttaccacttccctacttagcaatataccatggtttctatcactgttgaaatgataatgggagtatttatcattggcatcatctgggttagggaaattgaccaatatatattgggaaattggattaaaagtcatttttattgaaggcggtattagttgtaaccttttttggaaaaagaattaatacttaatagcatcaaggctattttttattagaagagggcttgtttcattcacttgtatatttcatttttgtgaaatgagaatcttgttttaaattaaaaggactgcatatttattaagcaattcagattgtatagaagtatttaaatagaaagtgaaagattcttatacttcttcctcctataactcctttcctcagagttaaccactgttaatagtttggcacattctttcagaatttaaaaaatgtatgtgtaaatgtacatctctggttagtttctgaaacatcagtttttaagagttcactgttaattattgtaatttgataatgtctagatggtagtagtatggacagaatttaatacgtatgtaatcgggttaacttcagaaagcagaaatgtcaatgtttaattgtattgatttcaatttttgttgataaaccattctcagcagtctttctgcttattagcttttaataagagacctcatagtaaatacagagattcttctacagtgaaatatatttctgcttactgctttaggtatattttatcaaaaaaatcattgagttactgagtatgaccagttaaaaatatgtttgcatttatttttagataggcttttagaaatacaaaattagttggtactgactggtttaaagagtatattggatataaaatctccataataaaaatcctttcattttgttttacttttaattttgagaaagatagttttgcttttcagatgtgattgatctcactggagatgataaagatgatcttcagagagcaattgccttgagtttggccgaatcaaacagggcattcagggagactggaataactgatgaggaacaagccattagcaggtaaaaacataatttgtataaagcagatataagtacttttaaaaatagaaatcattaattgggttaaattaattttaagaggtaataagatatactttgttactctaaactagtaatatgcttgtgtatttttaaattttatgtaaccaaaatcttcatatttagttttgattgcaattgggtttagatttttaagattttgggatggtgttatgagggattacatttaggtgcatattttaatatttctttcattttttttcttcccctaatcttttttggatgcactgtccaatttgcaacaatttatagcaagggtcagcatcctttttctgtaaagggctaatagtaaatatttttggctttgttggctatagggtttctgttatagctattcagctctggtgtcataacgcaaaagcagctatagctgataaataatataatgagcttggctgtatcctaataaatcttgatttacaaaggcagccagttggttttgtcctctcggctgtggtttgctgacttctgatctatagcatgataatatgtttatatatattgttcaaataaatgggcagggctccaagatgtgtgctagaatgcagtttttcatttaataaccaaaactttgtagtttgaaacagtttgattcatctaaggactaaaaaatacatttggttttcataatacctctaaaaatggagatataataatttaataagccataaagttgtaactaactgtaatcctctaaacaactatttgaaggcagtggtaactctatgttactgaagaagaaatttacttgcaagaggttaaatgtgctttttccaaaggcacacagctcagatgcatcttaagacttaaatgttcttttcctttaacatagtcctttggtaacagaatgtaccaaatttctcaggtaatttttcttggcacaatatcaataggagatttctttccaaataatcagagattactatatggtaggaaatgtttcaaaatgctatgtttagcaaaggcatataattttttatcttagtgcgactttttaatgtctttaaatgttactttggaaactactttgtaagacattatattatgtaaagacttaattaaactctattgtccccctcattagttgtggctaatatttattgccaggaactttaaatgaaaaccaaaaaatacgtagttaggcttattttctgaagcatttgagaaattatatgaattgggctttttctttttaaaacgtgtattgcaatgcataattgtcttgaataattatgaaacaacaatacttaaactttgagaaatattttaaatacaaaacacatgagttggatttcatatgtaaggggcatggttttatgtgaaaagggttataaaaagaatgtatacttgatacaaatattatttttaaaattatatttttgtttatatgaatttatatgagtatatgaatataaaatatatgtgagcttatatacccaattagtatcagtcgttctattatgtgttttctaattaaaacaacaggtactaattatataataaaagtaaggtaatataaaaagggatgaaggctgttcctaatttgatattcagttcaatgtatatgttatattattgttttggatagttgtttttatccaaaatggcaaaagaaaatctcttcagataatgctgttttttcattctaggtcttttacattttaatataatttaaaaatagtaaatatttggtagatattattattgtagatgacatagagattcggcataatgtaacatgccataaagctatgctccctagaagtaaaagagtcatattaattatgtgtaaattcaataacccgcaatgagcaaatgggtgttcaatgcaaaatatgcatttaataaacttatatgtaaatcatattgtattaggaaaagaggatgtggagagttctagctaaacattatcagagatatatttgctcatatgggtttattaaggtatagaactctaaattcaaaagagaaaatgatgcattttaaaggaagacatttatatattatgcttaaaagtaaattaactccttcttcattactgaagttgatatagggaaaatctttgcaaataaaattccagaatcatttgcttattatattttagtagacataatttaatgtgaagttacacattaggatactacattgtgtgtaatttgatgagataaagcctgtctttttacgtcttagaatcctgtgtttaggcatttatacgtttcatgctaaaattttttaagtagaacgtttttaaagtatttctttatacactttttagtgtcagaattgggtgtatttattatctcttgattatcactgccaggacacaagtggagtatggacagttgaaatttgttaataaactacattgtgactggtttgtgtctatggcatatttcttgtgaaaatggcttgcctcatgaaataactttgaagtgcctcattagaagatagtgctaagttttctagctaaaattgttacaaagagcacgcaccttcaacaatttcaagaagtagtagactacagattctttttttcctcattacttctgtgtttcaactagttatttcttgttatcttcagcctggagttgccattggggaaagaaagaaggatcatgtccaggaatagtcagggtggaattctgaattattaaaataggtctgtataactcctacattttttatccttatcattactgaggaagcagctgtgaaggggaactgtctaaagatggtgtgtgaaacaggagtggatgagggaggcagagttagaaatcttttaaaattgatctttgaggaggatttcggtgctcaataattccagatacttgtggatgctaaggagcatggaagggccatcgaataaccatcaaaccatttaaggtgtgttatgtcagattatagatgatctggaaaagtaagaaatatgacacagattagtttcctgggctacaaggttgtggctgcaggtgactgatgaacagcagcagtgtaacttgaaaaagtatcagcaacagtgaggtaccactgatatccccaggaagagggatcaactggtcgatgtagtcaggctgtccgtgtggcaggagccacaccccatgcaatgtgggctctcctacggccagatacacaggtcaacttttggtaggaatcacatgtctgacaagtagtggtagcttctgtgttagaaacgtagagttccttaatttgtactctgtatacgattgtggatgtgattccattttgggtattgtgattgtggcagtggtggtgatctgggttgtgcaagtttgatcaaaagctttattctgttcatctcattgaagaacacattagagcactcatccatcacaatggctaaaattaaaaagactgatgggaagtgatgtcagcaagatcgccaactagagttgcttggctatcatttccctcacaaaaaaggaaccaaaacaacgaataagtttattttgtctggagtgactgaggaaatgccctggagagtaccaagagaacagcaaagtccctgtggagcatagagtcaagaatagctccacagggaggagaccaaagtatcctgcctctgccatactgtctcccctgcgaggattgaatcaaagccagggggttcctcttcttataggaagaaggtaagcggagaatcatcagtcctcatcaccaccacaggtgccagcagtcactgctacaagagagttccccagtcctcacaggtcccaagtccagcatgaacagttgctgaaagtgcatgtggctacattcccccacagcaggaacctctttgacaccctgcacccctgcaatccaagcagctaagggatgacacaactgtgaaaccaagcccacatctggagtgcttcctgacctggaggccagtagccaccctgtatcccagaggcattgccctcattccacaaagttcacacaagtgcctctagcactaataccttggctacttggagcctaggctcaaaggcacaactggggccctgatacctaaacccacaaggctccctattacccagggaagcaggtgggcctgcatggccgggcagccccatgcggccaccaggctagtgtacatctgtccctggctctagctggcctggaggtggccccaccccaagggagagagtagtatacagccagtgggcctgtgtgaacttgctcccagcttgaatagctggcccagaggttgtctgcctgtaccactggaggattgtgcacagctgccgggccacaatttcctgcctttagtccaatagctggtttggaggcactctttccgcagctcaaccctacatcaccagagtcatgcacagcctccagacctgtgtgcatccacccctggcctgatagccagcccagcagtaaccctgctgccattcaggagagacagtcgtacaacctttctggcctgctgcatcagcatgtgcctgaccagcaaccagcttggtgccaactccagaaaaaccatgccaccacagtcatgggcttctgcatactaagtcactgagataatcacggacatcgcaggtgaggattccagctgaataatctgtttggacaccacaatactgagtccaccctgaaccaaagccaccacacgccatttccaatcagcaccctaggacccatcaacaggaaaaaacctcttcctatgaaagctgctcgttaaaattggaaaaagcaattgtccattacatgcacaggtaccaacatagagacagaagaatcatgaaaaagcaaggaaacgtgtcacccccaaacctggcaccacaatgcatctttagtaatggaatccaaagaaaagaatatttatgaaatgcatgaaaaataattcaaaataatgacattaaagaaacttttgagttgtaagagaatacaacaatttaacgaaattaataaattcattagctgagtgagaaattgaacaaagatagatattatggaaaggaacaaaacaggaatcttggagcttgaggaattaagtgaatgaaattaaaaaaaatacaattgagagccacagtaacagactagaacatgcagaataatacatttctgaacttgaagacagatcgtttgaaataacccattcagaagaagaaaaaaaaaaaagaataacaaagtatgaagaaagcccataggacttatcagacaccattaagcaaacctatattcatattatgggagtgccagagaaagaataagtgaagagaggcatagaccacccatttggttaaatagattgcctgtgtccttctgcacttcttggaaggaagtcttggaagttatggacatctaggaatgaaaagatccccaataaaattcagcccctcaaaatcctctcaaaggtacacaattctaaaagctgtaagacaaaaacattacgtcacatatatgggaattcccattagactgtcagtacatttctcagcagagactgcacaagacaggagagagtgggatgacatattcacagtgctgggaaaaaataaaaataaaatataaaaataaaaactgtcagcagagaatatatccggcagtgctatccttaagaaatgaaaaagaagggccgggcgcagtggctgatgcctgtaatctcagcactttgggaggccaaagcaggcagatcacgaggtcaggagatcgagaccatcttggttaacatggtgaaaccccgtctgtactaaaaaaaaaaaaaaaaaatacaaaaaattagccaggcatggtggtgggtgccggtagtctcagctacttgggaggctgaggcaggagaatggcgtgaacccaggaggcggagcttgcagtgagccgagatcgcgccactgcactccagcctgggcgacagagcgagactccgtctcaaaaaaaataaagaaaagaaaaagaaatagagacgtttccagacaagcaaaggtgatggaattcatcaccactggactggtcctacaaaaacacttagaggaaataataggaaatgaaagaatgattaataccatgaaaatatgtgaaaatacaaaactcatcaatataggtaaatccataatcatattcagaataccccagtgctgtaatggtgctgtgtaattccttccgtcctctaatatgaaggtttaaagttaaaaatgtcagaaatatcaacagctacaattagtggctaaggaacacatgaaagataaagatgtggctgggcgtggtggctcacgcctgtaatgccagcactttcggaggctgaggctggcggatcatctgaggtcaggagtttgagaccagcctgatgaacgtggagaaaccccgtctccactaaaaatacaaaattagctgagcatggtggtgcatgcctgtaatccaagctactcgggtggctgagacaggagaattgcttgaacccgggaggtggaggttgtggtgagccgagatcacgccattggactccagcttgggcaacaagagcgaaactctgtttcaaaaaaaaaaagataaagatgtaaattacagcaatcaaaacactaatcatggtggggtaggggagtgaggggaaaaagtctagattatttttgtgtgaccaaagttaagttgttattagcttaaaatagtctgttgtaactgtaagactcttcatgttagctccatggtaaccacaagaaaaattatagtagatagacaaacaagaaaggaaacaaagcttagcattatagaaaaccaccaaaccacagaagtaaacaagagggaaagaatcaaacgaggaatcttcataatattgagaaaacaaactagcatgagtaaattattacttatcagtagtaaccttgaatgtaagtggattaaattccccaattaaaaaatatagagcagctggatggattgaaaaaaaaaaagacccaactgtatgttgcctacaagagacacacctcatcattaaatataaacatagactgaaagtgaaggaatggacaaagatatcccatgcaaattcaaaccaaaaatgagcagaagcagccatacttgtactagatacaatagactttaagtcaaaaactgtaaaaagagacaaagtcattatgtaataataaaataatcaattcaccaagaagcaaaactgtaaatatataagcaccgaacaccagaacatccaaatatataaagcaaatattattagatttaaagggggaaatagactccagtacaacaatagtagggacttcagcatcccacttttaacagtagacaaatgatttagaaacatgagacttaaactacaccatggacatttacagaacatgaacagccgcagaatacacattcttttcaactgtgcatggaatattctccagtaaagatcgtatgttagagatggtatcaagtattttaccagatcacaactatataaagctagaaatcaacaacaagaaaaacgttagaaaccaacaaatacatggaagttaatatgcaccttaataaccaatgggtcagtgaagaaattaaaagggtaattagaaagttccctgggacaaaggagcgtggaaacacatacaaaaacctgtgggacacagtgaaacctgttctagaagttcatggcaataaatgcctgcatcagaaatgaggaaagatttctaataaacagattaactgtgcaactcagagaaacctgaaaagcaagaacaaattaaacccaaaattggtaggatggaaataataaagcttagagcagaagtaaacaaatagagactaaaagagcaattcaaaagatcagtgaaatttttttgagaagataaacagaatcaacaaacctttagctagactaagaaaaaaggaaaaaaaaaaagactcgaataaataaaaccagacatgaaaaatgaaacattacaaatgtatcacagaattggaggatcacaagagactattatgaacaactgtataccaacaaattctagaatataggaaaaatggataaattcttgaacacacacaacctaccaagattaaattgagaagaaatggaaaaaataagcagaccacaacgagtgggagaattgaataactgctaaagcctgacataaagatccctagtttctgatggctacattgctgaagtgtgtcaaacatttaaggaacaactaatattaattctcaaactattccagaaaattaaagaggagggaatacttccaaactcattttatgaggccagcattaccctgattcaaaaactagacaaggacacaacaaaaagaaacaggccaatatccctgatcaacctagatgcagaaattctcaacaagattctagcacgtccgattcaacggcatattaaaaacatcatccactatgatcgagattcatcccagagatggagggatggttcaacatacacaaatcaataaatgcgatacatcacagtaacaaagagaacggaaaccatataatttcagtagatacagaaaaaagcacattacaaagtttaacatcccttcatgataaaaactctcaaaatagatatagaaagtatgtacctcaacacggtaaagaccatagttgagaaacccacagctagtagtatactgaatgcagaaaaaaatgaaagcttttccactaagatcaagaacctaacaaagatgcccacttccaccaatcctattcaacatagtactggaagtcttagagcagttaggcaggggaaagaaataaaagacatcaaaattggaaaggagaaagtaaaattgtctctgtttccagatgatatgatcttaaatatagaaagccctaaagagttcaccaaaaaactgctacaactcataagtgaattcagtaaaagtgtaggacacaaaattaacacacaaaaatcagcacttctatatgctaacggtgagttatttgaaaaaataagaaaacaatttcatttacaagagctacaaaaaatctagatacctaagaataaacttaaccaaagagataaaagatctctacactgaaagctataaaacattgaggaaagaaatataagacacaaacaaatggaagtagatcgtatgttcatggattagaagaattaatgttaaaatggccatactacctgaagtcatctccagacttactgcagtccatgtaaaaattccagtgacccttcagagaattagaaaagacaatcccaaaaattcatgtggaaccacaagagagcccaaatagccaaagcaagcctgaacaaaaggaacaaaaggtagaggcatcactacttgacttccaaatgtactgctagaatatagtaaccaaaacaatgatattggtgtaaaaaacagacacatagaccagtggaacaaaatagagagcccagaaatggacacacctacagccaactgatttttgacaaaaactgttaactggagtaaatctaagaaatgtacaagaacttccaggaagaaaatgattaaatatcattaagacacattaaagaatacataaatattttgaaacattcgctgtttcatgaattggaagaccattgttaaactggtcggttcttcttaaattgatttatgggtttagtttgatcccaattaaaaataccgttagttttgtttttgcttttttaggaaatcaaatgagatgtttcattacccgccgccccctttttttttctttgtagttgatctatacagcttaaagtgtatgcatgtttctcagtgagtgtaatacttcccaaaaaggggcttaggtgagctatgaagtgggatattttcagtattactgctataggcaatttaacaacacaaaaacaataaaataataacaccccctcaccccccccccaagtaaaaccaccgtgtaataaaatttaatggaaacatgatgatctaccatatgtaaatgctttaaacatttagcgtagtgtgtggaaggaaaagacgcagcaaaacattttgtcgtctttttatattgcttactaccaaggtcatgaccaattttgagaagataaagcaaggtgataggtcagactcgtttttggtatgtggcttgcgagtttacccttcaaacattttgttataggctatctctgaaatttgccttttttttttctcctctaccagctggtaatacctggattttagccactgcatgtcttatacttaagagcttgggtagtatcattggaaaggccaggggaggaacccttatgcaggattttgctttataaaaagtttggatttatggtgccagtactagattatagaaggggatcaggtggagcaatagagcagtattggagctagagattggcttttgcaatcagtcagtcaatcaataaccaagaagtagcagcatttaatatcttcatcatccatttactttaaaaacgtgtttatcactcatttataatgtttgctctagaggtaaagcaaattcttgtttctacttttcagacactgattggagacactggttgatatttttggcacagtgttaagtgtgtttattaagttctttaggaaccaagaggagatggtaggaggagacctactgaggcatgctgtaaaattctggtgataaaatatgtttaaattaagagggtcaggaaatcatggcattcccctttcacctacatgctttttttttgcaccacaattctaccatgtggtatggttaaggtgtattgtgataaacccatttctttaaaacccatacttttgttaacagtgaatgacaatatctaccatatgactgaattgagctacttgggaaatggctattatttttaaatcttaggtgactttgaggagcaatcatcaattacatgtatctcttgaactttaatcaaagttgttacactttgtgcctcatttgatctctgcaaagaaagttatataggagtgctgggaagatgttgtcttggttcgtatccctaactttcttgcccttccaacttcctttttggaatggtgtgacaaatggttcaggctttacttgctcctagaaagtacatttgaggccacacattcttgcaagtcctgtgtggggagagagaaggcaaaggaactaaaaagcttacattatctcagtatatcaatgtgatgtttacattaaatattttgtatgtaaacatgccaatcaagtggtgtatattttttggtagagcagaagacgggcgtaaaggaattgactatacttaaaacatttcaaaagaccttcctggggtttagtaatcttagcccagatctggaatgtgaaaaatgtacttagggtgtattgtgcagaaatcagatgtcctcaagttttctgtagctgatgtatgtatgaaccatttcctgcttattgtgatatgtgtgatctgctctgttgacattattaagaaggatttgtttcttgttataattagtagttaaatataacgacagatgttcatatgctatagattcaggattacgtctggttcttttagacttttgagcagtttatattttagaatatgctgtagaatcctctttttacatattgtctgtctgcactggtactagtcaattgctgggtacctcttctatctcttatataggatcactggtactatttgttttatggtatcgtttttatctgcctttcccagaacttattccatgttttagtctatttatttctgactaccaagatacaaataagtttgctgtatctcaacgtctaaatatacatatatattacaaaaggaacaaaattttcaaatgagaatactgccatttataaaagtcaataaaaagttaaatatcccctctatatagggcagtcttttgtattacagttactttttatatactgtgcattaacctttcttttttgagcataaaccagtcttgaacaaattcagtttgttcaggttattattattctgctgaactgcaaaatttaactgttagaaggtctttaggacctcctgggtctccaataggagagtcaagttgactgtctttctatctctcccttgtattcttgaaaacttgctttctggtaacagtagaatgttctagatattctttggttttcctctgccccagttcatctaactaaatgtctttcaaggagttctatgtcttttcgtgaaacaagcctagagtctggggttgcctgtgggagttggtttttgggcagagagtagtgctggccagtcgggtcactcttaagtgtgacagaagtagaaactgtttacttttcactatatgagtttacattttaacatatcatgttgttaccagtttttcaaaaatgtgtgttttattgattcccaaagactgacttctgtattcacatggatattttagatttccttgtatctaatgtcttgtggtaaatattgctgttaaggataaaataataatattttgacattaatctgataggataaaatctttaggataaaaatggtgtgaaatgaatgagattttcttgataaaccaaaaagttgaaaaaaactaatctttactcaggttctggtaattaacacaaagtggttaagatacctgaatgttatttatgctgatttagaataataagtaacaagtttctttttttttttttttttggctgaagccaagtagcaagtaacacatttcttgagcaggcaaaatgcttggttagatcctatgtgggaaccagggttttccagttatgattatacttatgttgttgcatgctcaggagcaagaaacatcattaaagtagcattacttttgccatgtttagatatacttaagatattcataggtgagtttattttggaaaggttaactatcttttgttattctaatatgtattctaatatttatttcattaaattttcccaaaggcaaacttttgggcaaggcagtgaacatacaggttttcttttcctttacttggctctcatagaggcatagatctcaagaattgaaaggaatcataaagtttaactcactgaactttttttttgtagaagaagaactaagtggtcggtgataaaagtgcaacttgttcagtttttaatgttttcttgattcagagtaattgttataaaaagtggtcatcatgttatattgtaaatatgtactttaattgttatttctcagaaaattcatctagatggtatattcctggtactaatatctaatttgttgaaatgtgatttattgtactttctattatataaaactgccattttatgtttgaaatttcatttttcttaggaaaaaagactatacttctctatgtattagcattgacactgctaaaacgtgtatttgagtaaagttagtattaaatattatttcttcaaatacattattgaaatcttatgtaatgaaaatgcttttagaatgtgtgatatgcctgggatatataccattatataatgctgcatttttttccaccattgattaagagttcttgaagccagcatagcagagaataaagcatgtttgaagaggacacctacagaagtttggagggattctcgaaacccttatgatagaaaaagacaggacaaagctcccgttgggctaaagaatgttggcaatacttgttggtttagtgctgttattcaggtaaggatttttctttattcagttcttatttgatgtgtgtgatagcaatggaaagtgagttggttgtgtttaagttgtgtactttaaagataagtacagataagtttttaatatactattttgtctaataaactagcttggggattgaagtatcctcccatccctctttgtttttcatttctagtatgtattttttaacagtagatcactacttatgcctttcacttatttggaatcaatttatcctttccttctgcttttaggaattgttggggtggaaagagttttgtatatatttccctgcaaatttatggaagcattgtaaccaagtttgaaactagaactggctttctgtgggtcagatcagatttatttgtatatactagacagtgttatttatagaattatagacacttagtatttttaataagcattttgtttgaggttggtatagatttgcaaatctgagtttgcatgtgaaatgatgtgatgaataaatattgataaatcaagaataacacattgtctttttttactaagaaatcccttaatgatacatttcttgatctgcttattctaaaataagagacatatgtatgtgtagatatccctcttttcaatttggaacagttttcttttacgtgtttaacaactgttatcaaaattctttatcattctcggttgacattgataatgttatccatcagattgcaaaactttaaaacaatttatgaataatatgtccttaatttttattactccttaggaaagttaactaatgttttgtgttcgtttttgtgtgacagttgaattatagcttattatttcatgttcgtgatgaatgctttttccttcattggacatgcatgctattttttgtattcaaaatatatcttcattttgtaactttccaaacctgtgtgtatgacagcttaaactttcatatgatattaaggcaactaacaggttatttggttcattttctacaagttaattgtttttgctaacttgtaattttaacttttttttatatacttcagtgctaaaattttcaccgttttctccctttttgcttctggtgcataatatcatataatttgattttctttgtttttctggatttacctcactttttaatatgctgtggtgcatcctaataagtaatatgctatgttattggctttcccaggacatgaagatgctaaggaatacctggattaacataaatctatagtagtatctttgcttctagccttgattatacgttgtttacttacatgccaaaaagcaatatctaaaatattgataccttagagattcttagatcatcttaataggctatctcactttacttgcgctatctattaagaaggtttgtgcatatgataatttagacataattttaaaatattaagtatagttttaaggctctgaactgagtgctcatgaacatgttttgctgcctgtgtttggtcaagtagatgctatctcagcactattatggcaaatacatgagggtcattgattagaagcttttcttagaaaggtataagaagaaagaaagtatttgtaaataatattgttagaatagttgctttttatttctctatcctgtatgtgtagggaagttctgtttgaaatgataaatgctgatatagggataatgaccttttgttttagtaggataaaacttctttcagcagctcagtttaatcttgatacagttacaatctgtttctaccctaagtttgctaatcttagcttttctagcttttctttttagcttagatttttttttttaagaaggagggaatgggctagaaaaaaattatcttttaaaaaaatgcctagcttatttaaaaactagtaattgtactagttttaaaattttatctaagtttagtggctgcttaactcctaacataggcaagtataagagggcttgagttatttattttttcttttggtgaaatctaaacatctaggagaagtaacctataagcttaaaaattcaggttataatggcctaataagataatggcttttgagggagtagaaaacactaagcatcagattgtggaaaatgatgagtgggcagaaaaatttggctagagatcacctgaagttttattttttatggtaattttaaaatctatcaaactattttaagtagcttttaacttttatctttggtagagtcttcttaaaaattttctaccattattgcttaactctaagctataaactgagatataatacttggccatcataaattgactttttacttgtgaatgaaaagttgggccaaaaatctaccatagtgttggaggttttgttgttttccacagtgagttggaacttactcaaattgtgatgtaaatgtactgtaaagttttgattacaaaattttctcggggatggaatttacttagtaggactaatttgaaacatctgggaattctttttcttgtaaatatattgaccagttatagaagtttgctagtaatatcaccctttaacttcaaagtatatagctggggtaggctacaacagttatagatagctttgcatacttattattttagatactgagaccaatattttggtagaaagggggaacagaatgtaagaaagggaatataaacaaagagaagattgtacagataatggcttaaataatcttttggctgctggcaacattagcctgtctttaggttagacatcaaccccacagctagtcaggattatttttgtcctattcacttggtacttttatgtagaaagtactgattgcagctgttccccactagggtgtcactgaatgagttagctatttggaggtgtatgttcttctctgtagctctgggacatgtcgttgaagtggtatgggtgctcatgatgatccttagccccttagcacctttccatttggatgccgagaagtaaggtgctcatacttctcagtttgcttgtcatagtcccttttactcctattgtagatctgttggcacctgtcacttagtcctaaagccctgctgtgtatgatggtaaagtatgtggttaccttactcataaatcatataactgcaggttgactaaaatacaggcaccctgagggcagagagcacatttagggtactctatattatatatataatacagggtctggcacattggaatagcccatcaagtaattattgcatgaatggatgaatgaaccaaaagggagcatgtatggagtatctaaagtagtacgtgaggatattttaaaaaatgatgcatattgtcagaacatttcaggatataatttaaaatgcttattcatactccttgctcttctctctttaattttcatcaaagaaaaaatcatgtggcactaaaatgcttaaacctgtctgcttcctagtcctgccccttgaaagagacctgtatctaatccatttcttctctatcttcatttttctaaatgacatgccttcccactgagatagatgaggaatttgctctttcagttcacctgcctagaattgccttttgtttcatctctcaacatggttataatacaaattaaaaatagtaggtagtcagtattttcattttttataactttgtaaatgttacagtgattcactaggtcctcccatctatagtactttgttatcctggagttgtcaattgctacctttttcccctattttctatatactttaatattttctaaatgcttcaacatgtttgttatggtcttaataatatattctgtatgcccacacatatttgcttcatttttttgtttgtttgtttttggagttctgtcccatagaccatttctctgtttcaaatttggggtgaattctgattctttgtggtttaagcatgatcactcgctttctaaaagtaagtctagagaaatgggattggtcgatgtgggtatcagtttacatgtttttacttaatcttgctgtttgtagctctcaatcatctctcctttgtactgtgacatacaatttgactgatttttctgaacctgagtcatttaagatctccaaagactaaatttcctatacacccacagaggggaggcaattgtctgaatgtgctgggtctggaaagcacatgggggtttaattgttctgtacatagacttgtggtttcaataatgccatctatttttcaatccctgcctcaccatgaaacttatgtgataccatgctaatttttttttaatcctccgaggagaatttatcacgcttctcagtcttctccactgtaggcagtttatgtttcatttcctctgcactcttgccatcacttctttctttttcacaaattatttgaactcttatcccccattatgtctttgttattagcaagaatctaaccaaacttcattttcgtaagtgcttttcaaaattcacatattagctttggactgaatgaaaggatggttattttcaggtgcattaatcaaaaacactcttcaggcagtaaaagttaccctttcttacctcttttgaaggaatacattggacagtcctcatatgactttggtgaaggatatagggtctttgggacttgaaaaacttaatttttatgatttgttgtgataatcaatggtgatgagtttcactgagtaatggtagatgaggttgttttagaccatctgccttgtgatgttttgctggattccaaaacagaaataaaaccaaccttttgagggcatcacagagtactaaagcagtgaggaattttgagtaaagaaggatagtcatagagtgagcttgttatttttgatggattttgtcctttaggcatctccagaactgactgctgcgtagttgaggaactaagaaaatttttgcacaaagtttgagccctagtaaaacatcttagactgtgagttggaattctaaatggttagaatgtagcattaactgagaactgaaagttaagacaggcttcctagtttctgaattatatagttttaagttatctcagaatttattggattaaggcgacctgagactgtgactctagtctccctgcctgccagagcaaatgtaaattctctcttagaagatagtattatctggaacctttcctcaatttttcatacacaatgtctagtactcaggtcagtcataccagaaaataagatgtgtgtgaaaactaacacaaaaaaatggacaatagaaaacagcacagggaaactggaatacttgtctgccataataataattaatatgttcaaggaattaaaagcaagattgcgagtctgaagaaaactaaaaactgtaaagaacaaaatgtaaatttcagaatggaaaaatataaatgaaactaagaagtcagtggataaatttagcagcattattagacacaactgaagagataattagccaactggtaaattaatctggagaatatttttcagactaaagctatgacataaagatgggagcatcaaagagatactttggatatggtgagtagtactaacagtgtatttgtagttccagagggagagtaaaaggaaatagggcaaaagcatgtttgaagagattactcacaatattccaaacttgagaaagatcaagccatagattcaggaagcaataggaatcaaatagtataaacataaagaatactgcaccaaagtacatcataataaaacaaataactatagacaaagagaaatcctaaaagttgcaaggtggaaaaagatacacgtataaaggagcaaaaacaagactaatagctgactttgatacctttaaacatcaagtcacacataagcagaaataatgtctttaaagtgctagaaataaataactggccatcttgaattttatacctagcagaagtctttaaaaatgaagaaaaactagctgaaataattcttcaccagcacacccacaccaaaggaagttctaagtatccaggaacaaggaaaattctctatctacaatgggagctcagagaatagaagtgggattgaaattcttctaacctgccaagattctctttcctctttaaattcctcaaaagaatagtccatggtttgtctcccctacttaacagtagtcccccttatctttggtttcactttctgctgtttcagttacctgctgttaattgtggctgaaaatattacagtactgagagagagaaggagagggagagagggagaacacattcatataacttttattacagtatgttttctttacaattgacctattttattattcgttattgttgctaatctcatactgtgcccaatttataaatttagccattataggcatgcaaggaaaaaaaacataatatatatggagttcagtaatatctgtggtttccggtattcagaggagattttggaatgtatcctttttggataagagggtgctactctgtaccccattttcccattatttaatgcctctgttcttcctctaccactccactgcaaacatgactttgcagttgccaaatccaaaggttatttctctgtccttaatttattggaagaatgtggcaacctttcatgatattgctaatcttgtcctccttgaaatgtgccagctattttttgatgtacagcagaatcttttgtggaactttgtatctttattgagagtcccctgacacagctattttttaaagctccgcagtttattagaatacacaagtatgtttgaaagcccttgttttctccactcgtttttcttctgtgatttcccttagtattcctttctctttttcaaaactctttttcttttttcctgtgatttttaaatggtgctttctccccaaggttctgatcttggccaactgttaatgtattcatatcccttctggtttattacttctactcttactgttttaaaaagcagtcacaagactgtaatccctacaagggcagagactaccttcttagtgtctggcatatagtagatgctccataaatatttgttaaatgaatgaatagatgatttattttatgtgcttatattgttgaataaatctttctagatcacaagataaaatttttttttacagtttctgttaccagctttatggttttacctttcatatttaggttgttaattgatctatgtaatctggctctatttctttatatgtagttttctcaatacccaactgttgatcaaaaccttgtttcctcattgatttgtggtgccacctttaccttctgtcaagttggctgactcaccttttctaagatttgaaacattatcacttcctgtatagtaattttcaaactttataaactgtgacccaagaaaggaatatactgtatattataaaacattttacacatacacaagtgtgtaaaatatctacaatgaaaattttgcaagaaaatactctgatgtatttactgagtatgatacattgtgatattttccattgtattttatctcattttaaagaaatgttcagtatgatgatagtaaatggttgcaaactacagtttaaaaaacatactccaggaagcctttccatgggcatcctgcatatgctccattagattcttgtgtaattattatcactgcatcttgaagtcacgacatttctattacatgtctgtctcctttctaaattgtgtacttccttgagcattgagataatatgtaatttctttgtgtctctattacctaggatctgatgagtaaatttatttgtactccatttttctagtattaatgatacatctagataattcatggtaaacatagcaggtctaaaaagttttggacttgacatttgcatactctttattttgaggaaactgcttaagtgcatataaaaagagctattaataatgagtagtatatttaaaaagttgtccaaatataatcttgtgcactatcaagtatcaagaatggtatgtcaaataaaagaaacttgactttttctcagaagtatgtcctccttgtgccagttgcaatgattctgagtataagtagtacacagttgtaaaaaataaacctccaagactagtcatttttacattctgctaatggaattttccctcaggttatgttaaattgttgttctttttcagtcattatttaatcttttggaatttagaagattagttctgaattacaagcctccatcaaatgctcaagatttaccccgaaaccaaaaggtaaaattcaaaagatttttttaagcagtatatatactctatatgttctcttatatgtgattgatttttgggcatttacttggctcatcaaatctgaaactgtcaatttgaatgtcaattcattaatcttagttaccatagcaagttcttatcctttgttaatatattataaatacgacttttttcctttacctgtcacagtaatatgccaatttttggtgtcgctttagtaatttttttgggggggactgtcaaatttcagtaaactttataggctatagtttacaatttaaggtctttcctcagttgtctcctaaaaaattttgtggaaatcgaaatttcttttcaattgatcgtcttgtgcagccctttaaaaaatgcgttttgcattcatgtctttgcagtacaaatctgtatctttcattttggaagtgactgtcatagatgggtaatataaagtgacaacacacacaccagggccagattgcgtgggttctagctagggacctagagctggttacttgatttctctctgttccatttactatctgtaaatcatatataataatagtaattatttcatagagttgctgtgagcattaaatgaggtaaaacatgtaaggggcttaaaagtgcttggtacatagtaagtactaggtgtcagctattgtcagttaaacaataaaaaaaattaaaaaaaaaaaaagacttattttaaaaagaaccagtttgcacacagaatttatacctaatggaaaaaattacttatggagatgatatagttgcgtgtagggctttagtggttgatcttgtcataaacaatctgtagtcctaaagtggacttattgccaaggcaagggagttagttttaggtttcagtaaactgctgaacttttttgacctatttttagtaggagtgatgaaatattaaattatgttttcgttttagcgtttaatttttaaaaccactttttctttttctgtaaacacgtgaaacatttataatgcatgctagtgggaagataacttgatttataaccagcttttcaggttataatctctgggctgtagagtgtcaggctgataaacaacccattttcaaaagggagtcaggatcgtctgacaaactcttatgtctccagaaaaattaaggaaaaccctttcaatcattatggtttttacatggaactttctgaactattgcctctgtcattgcaatttgttaatatcacagttcttctctcttctcatatctcaaagtatatgtataatttgtgtgaaatggttgagaattatcatttctagttaggtatgcatgtatgtatatgcatcttgaccatttatggtcctggattttaatgttttacagagctttaatttcttttgttcttcacagagttgaatgaggccatgttagtttgtattcttatttaaaaaacagttgctatatttatgcttatatatcagaacgagttgtgaatactagagaaatgtgtaattccagtcttcagcacctttctagagaagtttgtttcttgcaatgggttagcctctccaggtgtccctttagcttaaggaaataaaagaatttctcacttccattctgagacaattacttagaatactgtgcaattttatatgattattccacaaatgtgactctaatttagtatagtgacagcagtacacactataccttgacatctttgaagcaaatggatttatagatagttatcagccactgaatggtcctatattcacttgagatggtgacagcaggtttttaaaaaaggcgtgagtgtaacttgtcacttatttaataatgaatttaccgccaactcgtgacatgtctacagctacattcaatttgaacactttgtcttaagttgcagaatacatttgggattactttgatcacatcacagagatgccatttgtatgcacttttaaacaggatattttttgctagcaaaatttgccacaaatattacatacatattgagtgagatttgaaagaaatctagtatttgaaattagtatgtattttaagtagacttggcaattgcttgtagaaattgaaactaattttagacactcaggtttctttgaactgttggtaatttcagtgtctaggagaattgtgaggtccctggaaatataataatagatccttgatgtaatcatcccctctcccctcacacagatatacatttggtttaaaatgtttcagactgatggcaaagcatattaaatgttgagaaaacaaagatgcacatgtataatatttagtggaaatcatcatgtaaatagctaaagccttattaattggaaggttatattatttaaagtcttgatttaggacaaatatttcaaaataaagaaatttatcactttccactacttaaagtgaatgtcatcagaaggaaatgggtttagttgagtaccatactgtattcctggagcaaatacctgaaggaattttgaattttacaaataaaaggggcattctgagatttctgccattagtcatgaagaagtaacaggagctggatttataagtctcagtgcatcttagaggattcaaagcatacaaaataccttttctgatgaaaatggtagaaatcaaggtagaaatcaacaacagaaagatatacagaaaatccccagatagttggaaatgaagtaattcacctctaaatatcccaagggacaaaaaaacaaatcaaatgagtaatgtcagaatattgtaagctgaatgaaaattaaaacatgacatatcaaaatttgaggatgaagctaaaacagtgattagtggaagatatcttataagagacatcttaccagacatcttattagaaaagaagaatggttttcaattaatgatagcagcttgcatatcaagacattagagaataaagggcacgttaatctcaaagcagaagtaaggaaataataaaggtaatagcagaaatctgtgaaccaaatatcagaaaaacaatacagaaaattatggaaccaaaaactgcttcttgagaagattggtgaaattgatgaacttctaggtagactaagcaagaaagaagagggaagacatatattacaaatataaggagtgaaaaagggaaacatcactacatactctgtagacactaaagggagaatagtggaatattataaacagcagacaagtatcttgaaagtcacaagctatcaaagctcactagtgaagaaatagataacctgtggtagccctacattatattaaaggaactggaacctgtccaccaaaaaattcagcagctaaatagttttacttgtaaattatattaagcatttaaagaacaaatgataacaattccctataaatttgtacagatacttaaaaagtaaaacttcccaactcattttgtgagctaagcattaccctgaaatgaaaagtaggaaaatacatttcaagaaaagcaaaccacacaccaatatttctcatgaatttggaagcaaagaattgtagcaaatttttgaaaaattaaatcctgcaattatatataaaggataatacctcatagagaagtggggcttatccaggaatacaaaattggtttagctttcaaaaataaatcagtatacttcaccatatcaacagactaaagaaggaaaaccatattatcatctctgtggatgaagaaaaatgatttgaccaaagctaaaatctcatttatggtaaaaatcttctagaaactaggaagcaatttacttttcaaatatgcttctcagcagaattccactaatttccaaaaattattacttccaattttgttactgggaatgtctcaaaaaactgcattgacttaggtgcggtgataaagaaactgatctcaggaaattaagggtacttttgaaagtaattttgtggattaaagctcatagtctttatacttttaaaacctatgtctgagggcatatttggaaccagttttattccctcttacctatttctcaggactcttttttggaatctattctagaagcaattctttctatgtgggttatactattttgggcagcaactatgtaaagatacacccccatcccagacccctagaattttacagtgttgagaatgccaactgtgtaaatttggaagaaaattttcatgtttaatatctaaattttttccgttaaaattgttattataagaactaaatattataagaatggcttgcctggtttgttgtcatgaaacatttcactaagttatgtgaattatgttattttttaaaatttccttcttgttttaaaatacattgttagtgattggtaatgtgggttgttttaatttctttctggagattttgctttaatgagccagtaagaattgaatgctttgtgtagtaaaaagttggggaaaagatatagaaattcttgtctttgagaatcttatagtcttattgagaaacaaaagtaagatttcagaggaatattaggagggtgatatattagtctcctattaggatctggtctaattattaaattaataaaattaaataaatttaaatattgtgattgaattatattaaatataatgttcgataactttagatataaaataaatgagtataaaataattttataagtaatttttattaaatataaaaacaaatattaaatttctaataatcgggtgaggttctaatattagtctaataattaagattgtcacaccacagtgacagtcggtgattcattgctcagtgaaaggcatttatttcagtagatgtggaatttgaaggtatcgttgacttgaaggagtctggaaaggcttcatggaggagtggagatttttgctaaatgggtttattgagatcaagcacttagaacagtgcctggcatgtagtgaacactcattgaatgttggctgttattattgctctgagcagcagcagctgggccttgctgaatgggaagtattatgagaagcagtcttgaatgaggaagatattcttggctgagtaatgacatgatttgctgtgaatatgtggcattcatgctgaaattgtgagcctatcctaggtcttctgcctttttgtgctggacttctttgagtctcttagatggcaccaacactctactttcttcaattatgatagagtgctaattcatccctaaactatattggctagtttaatttttggttactgttaaaatgaatatttattagtaaaaattttcttaatcttcagttaaggtgtttttgtttttgtttttttccttcaataggaacatcggaatttgccttttatgcgtgagctgaggtatctatttgcacttcttgttggtaccaaaaggaagtatgttgatccatcaagagcagttgaaattcttaaggatgctttcaaatcaaatgactcacagcaggtagttctgttgcactgacttgttcattaaccatttgtatttaatctgaacaatattaagcacctttcccaagaatatgagactatttgagatgcatgattctgctttattaaaaataacctggaaccatttaaaacatttgggagacttttaagagaaaagtgatcttgaaggtgttaaaataaagttttaatttatattatgattgaaatgaaaacgatggatacaattaagattatttacaaatacataattaaacatgttcacaaatgtgtgataacagaggatcattatagtacacatgcttttgatattcctgtgtttgctggcagggagtacttttccttaattacccagaaatggtttttgaaagatgttatctttgttattgttgcttttgtcttttattctttatatagtgtattgtggtagatttttatccattaccttaaaagaatattggtaattttcttataaaaaatacaaaatatctataaacaaaccagtattttcacatataattggaaaaatcagagaaattaaagaaggaaaacagaggaaaaaatacagtggcaaagaatagtaagtgttcaaaaagatagcggcaatgtgtaatggcagaagtttcaaaaagccactaagcttgcagcgttgttttttaaagtacatacttggatgtgtctctgttttgtgatgtatggagagggcgtttggaagaggaaggtctgagattctctcaccatcttccttgtgctttttgtttctgctttacatttaccttgtatggcaaatgtgaatgaacaaaaagggcactcacatcagagtttcttttatatgttgttgcatttttaaaaaaaattctaacaatgctccagtgccttttaggcttagtatctactcagctttgtttcttactcgctctgtcatggtaacactaacacaaatcaaaagaaagagaaataattttacagttgattccaaaccatcattttcgggcattcagcattccttctggttctaaatgtgttttacttttttttttcttctttagtatgcatagtatcttttccagtgattctgagtatacaattaaattttttaaaagattacttctgttctctgacttatctttccttctggatggctttttccttgtcttttttctggtttcttttttttttttctttcttttctagagattcatgttgattttggggtatcttttcacatttaaagatgaggcagcatagactttgtctggagccatgtatgtacataggtgggcttttcagtttgagttagagttgaaatggatacaactggcggttaaggccacaatataaatgcttttgcttcagattagcagtgtagactaacttttgaaattagtgattctttttctttagaggccttttaaagtagatgtgcatcaattaaggttgataagtttgattctcttctgttccctaaacacttgaatttgaagtctacaggagtaatttagtgaatctgtaaatgtaagcatcatgatttttttaaaagtgaatttatattttcattgtatcttcttcctaaatatttcaaatacatcatcttttgaagtacacaggagtcttttgagacaccctttggtatgtgatactgttagttttttctttttcttttccgtgtttgtttttttttgagacacagttttgttttgtcacctaggctagagtacagtggtatgacaatggctcactgcagcatcagcctcctgggctcaacccttccccagacctcagtctcccaagtagctgagaccacaggcacatgccaccgcgcctggcaaataattttattttatttttatagagacaggatctccctatgttgccaagcctggtctcgaactcctgggctcaagctatcctcctggtttggcctcccaaagtgctaggattatagacatgagccaccacacttggccccaattgatactgtcaattttaatcatacctttaattgttttattttataattgtcaattttagattgatttctaagaaagatagggattaacttctgaaaaatattgtgttagctaggaaaccttattttttgttggatgtaatgtttaagtgaattaaagttatacaaaagtatgaaaagttgttttaaggtgttacaatagttcctaaggacagtcgtaacaaattacaacaaatggagtggttaaaaacaaaaggttattctctaatagttctagagggcagaggtccagagtaaaggtgttggcagggccacacttcctccattggctctgagggagaatcctttgcttccaccgtactctggtggctgttggtgttccttgccttgaggcagcatagctccaatctctgtcttcctcttcatgtggctttccctcatgtgtctgtctgtcttctggttttctgtttcttacaagaacactcaccattggatttagccccagccctaatccaggctgatctcatctcaagatccttaccttaattatattgacaaagaccattattctaaatagtgtcacattttgaggatctaggtggacatatatttttgcaggctactattcaacccgccacagatgttatgaatgtttacagctggatttttgcgttgcgtttagtcctatttaactctacagctttggagcagtttacttaagcttcccagactttagtttcaacatttttttgaggttaatataaagttggcctacatgctctttaagaaactgctggctgaaaaaatatatgatagtaagtttgttttgtatttggggctattttggtaagtaaggacaaattgcttactactgattcatctgcctgtaagcagcctcagtagagttgatttattgtttttcccttatgttctatttattattttctgtgttccaactcacgttattgaaagaattatggtagttgataacacaactgccacaacctattcctgtttttccgtgttgggagagcaaagaccaaaggcatggtgaaaggtgataaatgggctggttctgaatgatagtaaaggtagatatggcttaaaaagttgtgtgtgtaagttgaattaagaaaagtgaattgtggaaagagactagtcttccttctaagagagaagccagtcataattctttataaaacgaagaactgtttgctaagatgatttcttcattttataaagattcattacagagctctttgggtggggagtaatgattattttttaaaaatctcatttgtaagtttggtttttgattgtgtgtgtgtgtgtgtgtgtgtgtgtattttaaagtgaaacccaataattgattatcatataatgcttgttttttcaaatatcttatatcctggttaaattataaaagtttcttgcatttcgtgtgaaacatttcacttgttatctttgtaaggagttggtaattatatatttcaacaactggctctaggtttgatgttacaacatctagtattttttttttagtaggctcaaatatcaacaggcttttttcttttcacagcaagatgtgagtgagtttacacacaaattattagattggttagaagatgccttccaaatgaaagctgaagaggagacgtaagttaccgtgaagtttagcaatggggttttaggaattcattagatagcatgtattaaatgtcaacagagaaataagaaatcaagacagacttatgggaatcccagtattttctgtattattgacaagctgtttagaatttgcaggcacaaataatagtgtaaccaaaaaaatctaaaaagtgatccctggaagagctagtcttacatgcccagttccttttcttagattcaataatcacttttcatgacgaggaatgaatttgcggtggagaaagatgtcaggaatgtgaattgtgacaaaatccttttacgtagaagcatgaagacagggatatgaagtagcagtgcatgtgagcaagtggctctgttttatctgttcactcagggccccgaggtcacctaggtttctgggatcttgctggcagtgaaaattatactgtgtctctaagtttctgcccagaggtgacacacatcacttctgcaaacattttgttgggcagagctatgtggcctaacttcaaagtgagtaggaatatctcacactaattaggatggcggctacgaaaaaaaacgaaacaccccccccaacccctactgacccaagaaaataacgagggttggcaaggatgtggagaaattgaaacccttgtgcagtgttggtgaggatatgaaatggtacagccactgtggaaaacagtatggggatttcttaaaagattaaaaatataatcaccatatgatccagcaattctgcttcttggtgtatatccaaaagaattgaaagcagggtttcaaagagatatttgtacacctgtgttcatagcaacgttattcacaatagccgaaaggtggaagcaaaccaaatgtccattgataggtgaatggataaacaaaatgtgctgtatatacatacagtggaatattatttatcctgaaaagcacagaagttctgacatatggtgtaacatgaccccttgaagatattatgccacgtgaaagaagccagtcacaaaaggacaggtactataaatcacttatgtgaggtatcaagagttatcaaactcttagcaacagaaagtagaatggtggttgccagaggctggggggagggggagatgaggagttgtttaatgcatatagagtttcagttttgcaagaggaaaagaattctgacattggttgcacaacagtgtgaatatacttaacattaccgaactgtacagttaaagggttatgtacattttatcacagttttaagaagtgagtaggacagtgtatcttaccatgcacctgaacgtgaagggccagaattttttttcagtagcattaaagactgctatactacctactggggttcttgtaagaattaagagaagtacttatcaacattattctaaggattaaatgatgacccatttatcaagagagatggtatcccctctctccctttttaaacaatacttcacaaatcaattaatataaacacaaattaatacagaaaaatctgtacacaattgtggatacaacgcatttctatacagtaaggcaaggataaactttgtctttttaggtcacacaaaccataaaaagacaatttaaaattttcaacttttgtttgctccaagcagaaaagaaaaaaatgaattttggtattaaatgacttggaaaatttgtagatgactaattctaccagcagtgtgaaacttcacaaaagaatgaagtagctgttcagctactttgggtgaaaaactggtacctcgttccctccctggtgagggttgttgtttttggatttttttggactcttccatgtaaatacaggaaataacctatcaaaattttgtagaaatgtattctgattaaaagtggcttttcttccttcccatgtccaaataaacgtgcactacacagagtatgagattgaaatgtgtaatgatgataggaagagcaggcactttgtgcacaaactgtgtcaatttctcttccaagttcatacacgtagtagctcattttaactcctatgagagtcctgtgggtgcagctatcatagttatccgcagttgacaggtaaagaaatggaagaataagtaccttgtgcaacgtggcactgtaaataacagagctaaatgcaagtgcgtgatagccacataagtgtttttgtcttgtcatatgttatagttctttaatattttctctatttataggtccgaaaattgtaatcacatttatattttttaacatactttagggatgaagagaagccaaagaaccccatggtagagttgttctatggcagattcctggctgtgggagtacttgaaggtagagttatacatttactttttattgcaagtgaagagagattattattcattcattcgtctcgatagttactatttttttagtggactttatttttaatttgatatattctgtctagtaatttttgttggattgctactgttattcacataaagcacagaattgaatgaaggaaaaggaatgtacagagtgcattatcacatactaattaatactttattttatcctcatgttttttccagtgagagggcttccatgatacaattatgttggaatacagggattaatgggatggttgatagatcctttgaagataatattggagttaaatactgggcttgatatgatgctcactttctttttcatgttgaaagctgaatttagcaacttagcatagtcagggtattatagagttctcactttttcagtgattttaaatgtagatattagttttcaggaaaagattgtactctatcttttgaaaaatcagtgaagagtgatactactccatttaagctaaatacctgtttcttaaaatttggcctaagtagtttctgtttgggttccctaacaagggaggagactctttaaatgtaacttcatgtaataatattaggtcccaaagcataaacttttgaaaaattgtttttctcacatcacccaatgcatcaacttttgaaagttatctttttccagatcagctaaagtgtaaaatttgaaaaaatgctttttcttcacgatcttaagtagtggattccctgaagttctgtttgaacgtaggtggtttgggattcagaaaaagacaatactaactcagatgttggccctttaaaaagtcttagtgacatgttcgtacgtttttgtttgtttcaagtggtaacaacttatatataagttgttttatatatatatgcacatatatatgagttaatatatataagtttatatatatatgtagaatattttacatagtacatttacgttgggtcattcatcttaatcattctgattttatttgaagtagaacactatctgatgcagcgagtaggtctcatcaggtcatgactaggcactgtttataataccctgcatgagcatttctacctgtattatattgattcctaaaattgattgttattaaaatatttaatttgttggctgggtgcggtggctcatgcctgtaatcccagcacttcgggagcccgaggctggtggatcatgaggtcaggagatcaagaccatcctggctaacacggtgaaaccctgtctctactaaaaatacaaaaaaaaattagccaggcgtggtggcaggcgcctgtagtcccagctactcaggaggctgaggcaggagaatgacgtgaacccaggaggcggagcttgcagtgagctgagatcgggccactgcactccagcctgggagacagagcgagactccgtctcaaaaaaaaaaaaaaaattaatttgtcaatccagtgttgaagtctttgtacttggtattagtaagttgctttagtgattgtgttatataaaggtggccttaatacgttttcacttgaactatgtgtttgcttcagtaaaagtaatttatttcagagtactttcttatcactttttacatagatcttcctaatactttctttcaaaccaatggttcttcattagggatgatttttagtttgtttgccaaagtacccccactgcaaaagtccctcaactttttgagaacttctagttcattgtcccctctcagcccttctctgtacttcactccttcctttttcatctaaaacctaaaactctctttccccccttcccttctggcaccccctccctgttctctaaccttcattaagctgttcatcttttctgtgtctgtactgagtacctgaagattgctggcaaaaagtcacagaaatgggctaactgtagtggatcatgaatttgagtgatactgagcttccgtgctcccaatcctataacccaacttgttctgtgtaatcaccattctttctctcatttactgcaataaatattttcgttttttccactcatttcagatctaacttatctcttcattctctgagaaaatctttacctcagatttcatagatttactgtcacattaatgaaacttaatcacaggttttgcccagtccccgaatctaattttacatttgtagttttgtatcatattctaaaaacacaacattcccaaatatatgagcctcaggctccataacctagatctatcactacctctactatatttttacctgctcctacatataataaaggaattacccagttttatatcaaaagactgttctttatacgtgctcagaattccctcccttcatgcttttactcagaccttacttcattcgttttttcttggcttttgagcttctcccactctttctttctcatcaatatttacacattgtctggtatctcaaaccttaaaaattaaaaacgttatcccctcccatactctttttcagttaataccctctcttgattcttattcaaaattaagcccctttaaagagaggagttagtttcaactgattactccccatttattaaacctagccccagtttagtttctggcttcagaacttgtctaaaagggatcttgctaaggttattgattttctacatgtggttaaatccattagatccctttcagtttctgatatagtttggtcatgtcccaaaccgaatctcaacttgattgtatctcgcagaattccgtgtgttgtgggagggacccagggggaggtaattgaattatgggggctggtctttctcgtgctattcttatgataatgaataagtctcctgagacttatcatttattaaaggcacttcttccatggcggcgacaagagaaaatgaggtagaagtaaaagtggaaacccaggataaacccttgagatttatctggggtttccacttttacttctacctcatttcctcttgctgctgccatgtaagaagtgccttttgcctcctgccatgattctgaggcctccccagccatgtggaactgtaagtccaattaaacctctttttcttcccagccttgcctatgtctttattagcagcttgagaatggactaatacagtaaattgggtccggtagagtaggacgttggtgaaaagatacctgaaaatgtggaagcaactttggagataggtaacaggcagaggttggaacagtttgaagggctcagaagaagataggaaaatgtgggaaagtttggaacctcctagagatttgttgaatggctttgacaaaaatgctgatagtgatatgaacaataaggtccaggctgaggtggtctcagatggagatgaggaacttgttgggaactgaagcaaaggtgactcttgttatgttttagcaaagagactggtggcattttgcctctgccctagagatttgtggaactttgaacttgagagagatgatttaagatatcggtggaagaaatttctaagcagcaaagcattcaagagatgacttgggagctattaaaagcattccattttgaaagggaaacagagcataaaagttcagaaaatttgcagcctgatgatccagtagagcagaaaaccccattttttgaggagaaattcaagtcgtggctgcagaaatttgtgttaagtaacaaggagccaaatgttaatccccaagacaatagggaaaatgtctccaggatatgttataggtcttcctggcagcccctcccatcatagacccagagaagcctaggaggaaaaaatagtttcgtgggctgcccgtggtactcatgctgtgtgcagcctaggaacttggtgccctgtgtctcagctgctccagcttttgctagaaggggccaaggtgtagctcggcccattgtttcagagggtgcaagccccaaaccttggcaccttccacgtggtgttgagcctgcgggtgcacagaagtcaagaagtgaggtttgggcacctccacctagatttcagaagatgtatagaaatgcctggatgtccaggcagaagtttgctacagagttggggtcctcatggacaacctctgctagggcagtacggaagagaaatgtggggttggagcccacacagagagtccctactggggcaccacctagtggaactgtgagaagaaggccactgtcctccagaccccagaatgttagatccactgatagcttgcattgtgtacctggaaaagctgcagacactcaacaccaacccgtgaaagcagccaggagggaggctgtaccttgcaaagccacaggggcggagctgcccaggaccatgggaacctacctcttgcatcagtgtgacctggatgtgagagctggcatccaaggagagcatttcagagccttaaaatttgactgccctgttggatttcagactgtaacccctttgttttggcctgtttctcccatgtggaatggctgtatttacccagtacctgtactccaattgtaactcttctcaggaaaaaaatcagtcagtgttacagtttttaggttcaggtgagaatccttacataatcttaattttagtagccaaaaggccatgttgaggatcattaattttctcccttcttatagggagtaactagcttgcttttgatattacaggcttgtaggcggaagggacttaaccttgtcttagatgtggtttggactgtggacttttgggttaatgctaaaatgagctaagactttgggggattgttgggaagacatgattggttttgaaatgtgaggacatgagatttggaggggctagggctggaatgatgtggttcagctgtgtcctgatgtaaatctcaacttgaattatatctcccagagttcccacatgttgtgggagggacccaggcggaggtaactgaatcatggtggggcagtctttcctgtgctattctcatgatattgaatacatctcatgagatctaatgagtttatcatgggtttccacttttgcttcttcctcatcttctcttgcctctgccatgtaagaagtgccttttgcctcccgccacgattctgagggcttcccagccatgtggaactgtagttccaattaatcctctttttcttcccagtttgggatgtgtctttatcagcagcgtgataatggactaatacactttccatattgaattcttaccagttgttaatgctgatgactcttaacctcttcttcctcctttttcctattctttccttaaaaacacatttctctggcttttgtaacaccatattcttgtggcttttttcctgcctcagtgggtacttctaagaaaagttgtatttatagtctctttttgcatataaaggtagcagaaccttaggactttgtttaggcccatttcttcttcctgtcccatcccctaggcatctcattcagtgccttaatttcctgctgtcaataagccagcaattctatctttattccagaatgttaatcttagttacagattcatattcaactgtcttctcaaattgaaatctcatggatcataatgaaccagtgatttccactgctacctcaaaactaaagaaaaaaaaaatcctgtgttcttacttaagtggtgccattttcagtccataatctgccaggcatgatggttcatgcctgtaatcccagcactttgggaggctgaggcaggtggatcacttgaggtcaggagttcgagaccagcctggccaacatggtgaaaccccacctctactgaaaatacaaaaattagtcgggtgtggtggtgggcgcctgtaatcccagctactagagacgctgaggcaagagaattgctggaactcaggaggcggagtttgcagtgagccgagatcacaccactgagctccagactgggtgacagagcgagactctgtctcaataaaaaataaaatgtcatcatcatcatcatctagttgttcaaaaaaaaaaaaatagtaatcattatcatcatctagttgttcatgccagaattctgttattcttgatattttccttcttacctatctcttatcctgctcagtcaagtcctgttggtgcccttccttgcatatatgtataaatgtatatgtatgtaattttatctcttttctgtatttttacttttaacaaccttcatccatgctacctttatttctggatagattctgcaatagtcttttaacagatgaccacccacttcacacagggactttaaaggtgtttcagagacataaacctgagcctgttattcttagatttaaccattcagtgactgtattagtccatttacatgctgctgataaagacatacccgagaccgggcaatttgcaaaagaaagaggtttaatggactcacagttttacatggctggggaggcctaacaatcatgggctggggaggcctaacatggcagaaggtgaagggcatgtctcacttggtggcagacaagagaagagaacaagagccaagccaaaggggaaaccccttataaaaccatcacatctcatgaggcatattcactaccacgagaacggtatgggggaaaccgcccccatgattgaattatctcctgctgaatccctcccacaatacaggagaattatgggagctacaatttaagatgagatttgagtggggacacagccaaaccgtatcagtgactttgcattatacccagaatgtggtggggaaaaaaattcttaataggaccacaagaccttgtagattttaactcactgcctgacttttcattgtaatctctcccttggttccccaagctacactaacctcctgttagttcctaaacatatcaacttctttactgccttaaagtcttcatcatgctgttccatggccaagaatactctatagtcccccagcactctggcatggctaactcccactcattattcaagtctgagcttaaatgtcctttgccatggaggtcttccctgctctccccaccacctccaagactaagctcccatttttatacctctcacataattctgtctcatcacaactttctttttataacaattgtaatataattatttgtaattatttgtttataaatatatgtgaagttaatgggtataatgttttttaaatgaggctgagaattttctcagctcagggaccatatctctcttgttcactgctgtatatattcccagtgttcagtacagtatcttgcccttagaaaatgcttcttgcgagaaaaaatatacatacatatgtgtgtatataattacatatatgtggatgtgtaatatctatggctgggtataaatgtacatttgcacatgtgtataaaccaacaggaaaattaacactaacacttctcaggaatgaaatcagtcagtgttacaattttcaggttcaggtgagaatccttacgtactcttaattttagtagccagaaggccatattgagtattattaattttctcccttcttataggtaaaaaatttgaaaacactgaaatgtttggtcagtacccacttcaggtcaatgggttcaaagatctgcatgagtgcctagaagctgcaatgattgaaggagaaattgagtctttacattcagagaattcaggaaaatcaggccaagaggtgagtttaacattttcattgtcccctttcttccctaggtctttcttacaatgctatagcacaatgtaaggttctaattatagagctacctaataattgagagagaatactcagagagtatgtttggatttaattggtaatttagacattcaggagacctgtccagtcaatatggcctataatctatgtcaaattctcacttaaataatttatctcagaattttaaaatcttaggacattgttcagtctttttagacctttcaatcaaggtaccagccattagcagcatgctagttcctcgatataaagaagaaaaatcctgatattacagtggattttaaaacagatatatgctacttatatcaactgttattggaatttgtccacgatgcccagattccttttcttgtaaaattgctatgtgattgcataaggtcagatggaagaacttcccttctcaaggaagaaatcatttttataaaatattgttaacttatatgtctacctcaactagtttctttctttccagccatctctgtttctttatccatctctgtagctgcatctgtgtagccattcatccatgcattcatctgtcagggagttttggcactgtaatagtaagcaaaggacatacgtgcttccccaatcagttactgttaagaaattgctgatagttgtctagctgttaaactccatgaatgtggctagaggtctttatctgtgtcattcactattatatccctagtggtaatatggtaactgcatacataatacttattgagtgaatgaatgaaatgtcttggtgcttatcaaacaagtttctgaggtctttatactgaataggtgcttaataaatattaagtgatacgatgtctctgtgtttatctaaaaggagactttgttcttgtgtttttgagaacaaattgcttttgtctaaattttaatttttttttcttaaagatgcagttaaccctttcctgtttcaagtgcatactcatttttttcctcttcccccccacatacataaacaaacaaaaatatgcttttcctgttaagaggaagagatgtatttgaaatagtctttctctctacatcgtagatcatctatttcagtgattctcaatagagaatagccagacttcaaagttatccaggcagggtctacgatagggatgtggtatatggacacaagagctgcacaagtaattctgataaaaacctctaaataagaatgtttaaattcagcttattttattgattgggaaacagatctcttaagagtgggactttaccagtatcccacaatggaataagaaagcagactcttaaaatccgatctgtttgctgttaaatgaaaggatgattggggtagtaaggcagggatggtacttgtttttatattatcagagtagctgaaatacactatggtttattggtaatctttctcacatattcccagcttttaaaaatttttattgtacacagaattgaaattttattgtttatttaaaatatcttagatttgtcctccatctttttattggttttatactctgaatgcccctatgttgcaatataaatgttctgcctaggttttttcatctagcctagggaatataatgatttatgatggttctctattttagcagtttctaatctccactactgtggcaaatttgattgcctgtgattcctgctaccatttttctagatttgctggaggctatagtttcaataataattcagcttgatttaagagactgtcactgactaaagtatagtatcagtttttaaaaaataacatatttaaattatagtcttattatatcctttagaaaaagtattcttgaatctctaaaagccagtaagtaacattacagactatttctaaattggcataatccctgataacaatagctttttcctcaatctattaaaaattgttgattttattttggcccagagaacatcttatttgctgaaatagctgtggccaactaatatataggaagacctccagtcttccaagctaaaacatccaattggctataagagtttaaattttgtggatgatatactaagagacaactgaataagttaaacatgattatatccaaaataactgcttaaatattttttaaatgatacattttaacttttaaatggtatgcaatttgtagatgagtcagactctccaggaaacatggagatattttttgattgtctgttggaggaaaaaaatttcagatagtaaatacttcacttgtagtgtgagtattcactactaccagtgtgtgctgtgtgttcttttagactattgctatgcacatataagtatttgcatctgtccacactgccccgaaagttgcatttttcactcagcagtatatcatgagcatgcttctaagttagtgtagagctttacgtcagtgtttttaaaatctacatagtgtcacatagtctgtatttataaaattaaattgatttaattatcctgtaaggcagtaactcgaaaaagaactattctgaagaatgtctttgtataaatacccttgcgcacttaggaatgaagtatagttagaagtagaatctttgggtcacagggcatactcatttagatgtgttggcactgccaaatttcccttcacaaagttgtaccaagttataataaagtgctagaaggagtttttacaaagctttaaaaacaaaattagagaaacaatatcgacatgtaccatattagacatctgtagaggttatatggggaacttaacttttgaaatcaaagggcaaatgagtcaaggcaattaaatgactggagctaattttttaactggaataaaaagtttttgcttcttgtgcatagtttacatcctggcttggtttgatattccgtggggaatttgaagtgataggtgtgttttttctgttgtttttttctctccacatttgtgtaatcctctcataaaagcaaggtatcttatacactttaatagaaaaccagctattaaaactcataaaaatgacatactctttaggaactacttttgttaacaggtgagatttctagaattgtgatgaatttagaagcacttgtgctgccaatactgattatgtaagttctttattcactaactgcagaaatctattcctcctgtagtttcattatctagtaaaataataatatgtttagagatatggagaatgacctctgtctcacaagcatggcatactagttagattgtagacaagtagatatagttttttgttgaatggaaatatttttttgaaagaaaaatttctcatgtttcgtattatttaaaattcaaattatgtactgctatactacaatccaaatattgcagagctagacataccattaatattttaaaacatgaatttacagaatgtctggttatctcatcttgtccccatcagctttagaatgagaaagtgaaatccttccactcttgtagtaggaaaaacctgccatcgctgatagaggaaaatgcattcataacagagacatattacataacatttttgaacatccttttgtaaggtatggaagctatttatatttcctggacttttcatggtctacagaaaagtgtaccccagtttgggtcatttcatttcttgtggccattgtagatttccatgaattaaaatatgtaactatttaattttaatggtgacatttaaagtattgcaataaaatatgaaagtgatagttcttgaaatctactttcttgtttgagtatcataaaatggagcagagaatattatcctaaagaatcaaaagtgttctttctgatgtgtctggggtaatgttttaattcttaataataattttatatgtggattagaactaactcaaaaattcttgccagttccatgtgagatcaaaatgagtaagcaaactttgctaatcaaattttaaaacttgagatgtttcttatatttttcataattttatttaatccgtttcaggtattatccatataaaacaaattccttaaactttagctttcagtaaaagataaccatccagctcaggaaatctcagttcaagtaattatagcattttgaaagagaaatagtattgaataccatttgcttttatttgctgtagagaaaagtagcaactttccagatcctcctcagattcagtttgccagatgtgtgccattcatgctttttttggatgttcaaatttaaatttggtatattcttaacttattgacagatgtgtggtggcattttgtgacacttgaaattatcacacacaatagattatgcagcagtttcgcatattgcagtttataataagcacttcagaactattttatacttctgttctttgttgatttacatacaatctttctttctctttaaatacatatgcttatgtataatttgaggttgtatatgaaaataattttcttttaaaaatgttgaatttcatgcttaattgaacagttaccaaagcatgtatggggattaggggctgggggtaggggaaggaaattacggctatactcattatcagaatttggctcatagcaatgagacattcaattctttaaacactagttattttaaaagattttaagtaaattactctaagtattaactttttgttagtgatatgtctttttcataaattagtatgaaatccagcagaggagctaaagctaaaacaggaaaacaccattttttcatttttagtatgagagttgtgacgatttatgatataaatttttttttgagtactccctctcataagttattttatcacaggattttgatgctttggttaagtataagtgccattcaacatcacgttgaagaagacagagaagacttgagctactaagtcatggttttaaccagtgtctttttctttgggctagaaattctaatgtaaagaattattttcgaaggatagttgtgagatttctttttttcctgatcatatattatacccactcttggaattttcaagaggtgtggaaaacttttagaaagaggttgagttttaactaaactgtgtacccagttacttgtcaggtccgcattgtggtgatacatataacaatgtcagtgcccacatcctgtgcctaagattgcagtgaagaaaacaaaggtggtattaaagtttttgttattgttttatttcctttcagcattggtttactgaattaccacctgtgttaacatttgaattgtcaagatttgaatttaatcaggcattgggaagaccagaaaaaattcacaacaaattagaatttccccaagttttatatttggacaggtatggtttgatatactgcatgacttagtttgaaacagtttagtaagggagaaaatattgtttagaggaaaattctgcataattttcttagaattaatttctacttttgcataatatacctaataccatttgtcaaggtagatgaaatttactttgtattagaaaagtatagtttttgggaataatgttataaggaaatttaaaaaagatgaattttgtaatcttaaaattcagaattttaaaaaataccattttgtattatctaccttacatcttatacaattttgaatgaattgatgctttgtggtgatgtctgtacttaatattgtatctatctatctttctgtctttctttctgtctctctgtcttcctgtctttctgtcttcctgttttcctgtctttctttcttttgtttttttctgtctgtctttctgtctatctttctgtctttccttcttttttgttttgagacagagtcttgctctgtcgcccaggctggagtgcagtggtgcgatcttggctcactgcaaacaccatctcctgggttcaaatgattctcctgtctcagcttcccgagtagctgggattacagacacccaccatcgtggctggctaatttttgtattttagtagagacgagatttcaccatgttggccaggctggtcttgaactcctgacctcaggtgatcctcccgccttggcgtcccagagtggtaggccgggtacgctggcatctggccatattgcatctactttcatgatattcggaaatgctaatgattacctttttctgatagatacatgcacagaaacagagaaataacaagaattaagagggaagagatcaagagactgaaagattacctcacggtattacaacaaaggctagaaaggtattttaacttttatgaaattaggagataattatcagaaaccatgtatttggtgactagatttttaatttcaaatttgctttgagtgatttataattttaggagtagttaatattgtgtgaatagttttgagttttgcttgaaactaaaaatctatagtagactttaaaaaattattctagtgtttaaaattaaatatctcattgtcaacaggtaatgttcctactgctgaaaatagatacaaagttaaatgaatatagttttgaccttcctttttgcatgaaactaaagattactcttgagattttcattaaaatgaatggtatctgagtttttctccttaaaacaggatacaaactcagctgcctaccaagtcttctcagcagcttcgtaaaggaggaaattgtgtcaggtgtaagatggtatgtgccgggagcctagagagcaatctgtgtgtacagggaatgaatgccattccataccagtggatggtaccatgtatgagtatggcctcactgttgtctattgatttggatcatttctaaaagacgtcagaatctggactgagaaatgttctacaggccagacagaaatctaaaggctgaaatgtcacaagtcatttcagtttgcaaaccccaatctgctctgcattcccctattttaggaattttcaaattagtagtctaaaacttcttacatcaaatagtatattgtattttaatgatttttattcttaaaaagtatgaataatcatattgaaacatgattagtggtaaaagataggaggatagtacacatcactgtcttgatcatgagaccagatgccagatctaaaaataaaaacagtctcaggagatgtcagttttcatcttcctattgagttacaatttagaacagcatttacagattataacagtatatactcacattcagtcccaatcggccttggtttcctgtctttggggaacttttaatgtttttcttaagtgtatattcagttttaccatcttcgttttaaagcaaatgaattttattgctgaggaagttttattgaagtatcgtatcacgttttataataataataaaggcccaaatatgctgtatatagaaataaaagcatttgtacattttatgattaacagatatttaagctatggttccggtcccaaacgattccccttggtagatgttcttcagtatgcattggaatttgcctcaagtaaacctgtttgcacttctcctgttgacgatattgacgctagttccccacctagtggttccataccatcacagacattaccaaggtaaaaagtaatcctgatgcaagagacagttgttacctttattacacaataatgtaactgctgcctttaaagacagtttctataaaatgtatgctttgatttacttcagtgaactcctaagagtagattcacttagaagactgtatgtcctctgggagtttttttattatttcagtagattttatggttatggattaaaattttaatcacattttttttcagttcagaattatactttagcatgttttggtatgtacatatataagattcagcattttatgatccataaaaatagtactatcaaattagaatttgtttctgtaatgtaagctgataagccagggaaaataatatcaccatgcgtaagattttcttgttttttagaaataaatatgattaagctgttttaactctaaagctacaacttcatcttataataatttagttcttatgtattaaaaatctcatttggatgttagatcaatccacatatttctttaagattttttcttttgaattacaagccaatttaatactgtgggtttggcacgatctttgtcaagagtttcagcttgaaaggttaataagaaatactctatgctttgatacagcacaacagaacaacagggagccctatcttcagaactgccaagcacatcaccttcatcagttgctgccatttcatcgagatcagtaatacacaaaccatttactcagtcccggatacctccagatttgcccatgcatccggcaccaaggcacataacggaggaagaactttctgtgctggaaagttgtttacatcgctggaggacagaaatagaaaatgacaccagaggtaagaagtgtctcatagcatggttactgtcacctcagatggatatgtgtaatgttaatattgagaagggaaatcacgtctggattttatatttaaatattatagtcatttttcttttccagaaagggttttaagataaactagtttggctccccatttttataatctcaatatcaggttcacagggaccaaaagattttccctggattgcttagctgattaatgacatagcagatggcctgattttctagtttgctgctctaaatttatatcaaactggtattcacagttactccattggagaaatgtcatacaatatcaatgtttgtacatatcaattaggtactaaatctaagtttgcacagggagttccggtgattaaaaaattttctttgggcttaagaattagaaatgtgaattttaatttttaatagctctaacagatttatgagtatctatgatcccattactagtctgtaacagagtttttactggcatgcagcaaaataagaaaaataaggacagtgctctgggtggggtgtgtgcacttgtgtgcgtgtgcgtgtgtgtgtgtgtgtgtgtgtgtgtgtgtgtgtgtgtgtcaagttgccatctgtcctttcttggaaggaactctcttttattcttttctattctattttttcttttttttcagaataagttattctgaacttttctctttcctactttgctgctgttaaagtgtacttaaaaaaatggattatggtagattttattacatttttttccttaaatgtgaaaatataattccctattatcattccccaattttatgctgatttattgatttttgaaaaaaatgaactatgtgacatggttggaattatattgaacaatattgattgttggatattatatgaccaacttaactctttatagacaatatttgaaaaagaatggccctaatttagtaagaagtacataaggtatgatggtgactaacagcattagtagctgtcaagattttctttagtatttttcaaataagagggaatttttaaaaatatttgaactcattaacaaacattaatcaagcaaatagtgttgatgaagcactatattaggcgttgggtaattttctactcctcatggcaggttgtttttaaaagattacattcagaggagtggaagctaggaagcttttgacacctaagtagtggcattgagggagggaagaagtgaatgtacttaaaatactctttggagacaactgacagatgtgggtcattggctagaggtaagagagagggacgaatcgaatgattctctcagttcataatggtatgaataaccaaatagaatgtattttggaaaaaaggtaaagcagtgggcaaagaggttcccactcaggggaggaaagagaaatatgatgagttctcttttggccattttaagtttgaagagcttttttgagacggagtctcgctctgtcaccaggctggagtgcagtggcatgaactcgggctcactccagcctctgcctcccaggttcaagcgattctcctgcctcagcctcccaagtagctgggattacagttgtgtgccaccacacccaactaatttttgtatttttagtagagatggggtttcaccatgttggccagggtggtctcaatctcttgaccttgttatccgcccacctcagcctcccaaagtgctgggattacaggcgtgagccaccatgcctggctgttaagatttttatatgtaatactatggatcaggaaagaaggttttcctcaggatattttttttctttctttcatccatattgatgttagcagttagcattattttgtaaactattgtgtaatattccaacacacgggtatgatgtaattcatttaattcccatattgatatttcctaaatagtgctggtcttcgatatacatatttatacacttctgtaagtaggatatgttcttttttatgttcaggggtacatgtgcaggtttgctataaaggtaaattacatgtcttgggggtttggtgtaagattatttcatcatgcaggtaataagcacagtacctgataggtggtttttccatcctcaccctgctcccaccctccaccctaatgtaggccccaatatctgttgtttccttatgtccaccatttctggttcagagtgtgtatattttaaattttgacgactgttttaaaattgtcactccaaaacattaaaccagtttgcattcccactgtgtgagagagcctgtctcccagtatcctccctagccctggacactttttagtagtttttcacaattgaaaaactggtattttagtgttttgatttgcattcccttagcttcgagtgaagttggatatttatattgttctgtaaatttcttgtttgtgacatttgcccattttttaagtattgagctatttgtatttttcttattacttaatagaaagtttaatgtattgtggatattaacactttacctataatatcacatatgctgcagatattattttcccagtttttcatttgattttatgttggttttgttttctttttataatgtagattttttaaagtgttgggcagggaggatcttatcttttcctataaggttactagttttctgacaggcttaagacaggtctttccccactctaaagttagccagtttcttttatagtttttcaaggtttcttcctgattggttcagcagcttcacaatatgatgtggttacaatctaaccgtttccttattgacagatatttaggttatctcttttttaaaaattattgtggacaatatgactgtgaacatccctatctgaacaattttgtaggattattttctactagaagtagaaataattgtcatgggagtgccataattttattttcactggtgattatagtcgatttttattcagttatgtgtgtgtacaagatatgtggtgaacatgttttactttgttcttaagtttacttgtgttatagcaatatgtaaggaagcttagctttcattttcattgaaactctcctttatagatttgaacaaaattcacttttattggctctgcacattttctagataaatcatatttgtgttgtttttaaagtatgcatttgtactgtgtcttttattaagaataactataattcattttctacagatttcaaatggtaatgttttttaagaaaagttttaggaaaattttcctattcctctaacatgtttgtaggaaaaacattagtccttatcttataagtagaaacacatttgctgttaatcattaaatgacaccttatatccttagatttgcaggaaagcatatccagaatccatcgaacaattgaattaatgtactctgacaaatctatgatacaagtaagtgaaattttgagctagtaatcattgtcaaaattatttacatatattttaatttacctttacattatcttaatctaatttttctttacatgttttgttttaaaattttggcaaatcttattgtaaaataataagggcttgcaatatgtacaatgtgacagttcatctgaatggggaaacttttataacaaatttataacaaaattcatgacaagttttccccattcagttgtattttcacaccgtatgtgttgtgtacccttactattttacagtaaaatctaccaaagtttttcaaaaggctatagcatctttaaaaagtcttatgggagaaaatctatggttgttaaaggatattaagatttgggaagaaacttaaggactccattacattttaacttctggtgtatatcatataatctattttgttaaccgtcaatttagaattctgaagatgtagacacatttgctatatgtaaaactgcccactataagctttttattcaaataaacaattaggccaatgagtatgtacacaataaatacatttttagtttttcaaaaatcatctttttaatctatcaactttgcatatctttagcttattcagattccgtctttttaaagttttatagtttagtttttttcaaacttttaagcccagccagttctctctcatttaaaaaaaaaaatgctcttatggttttctccaaacaggttgtttgtgggtttcatggaatgtggtatatagtaaactacataattgcagtttaactcttctttttttcacatttaggttccttatcgattacatgccgttttagttcacgaaggccaagctaatgctgggcactactgggcatatatttttgatcatcgtgaaagcagatggatgaagtacaatgatattgctgtgacaaaatcatcatgggaagagctagtgagggactcttttggtggttatagaaatgccagtgcatactgtttaatgtacataaatgataaggcacagttcctaatacaaggtaagaatatatagggtggtgtgtatttttaaatagtcataaaagtggctctggtatgtggtgtgattagttaagtgtaattcactcagacgatgaaggatgtggttaggaaatgctactgggttttgacaagactgaattgaaaagtaatgtcgtcagggctaagaattcgtatatattttgtattccaagtcaactattaaaggtaaatatgacctttttcgtccttgctaaaaatgctttagtgactgttccacagattgactcacatttaatatttaattccttagcctaacatatatggcctctgttcttggcctctgattatctccccaccttcattgatcaccagtgttccttttgaatttatatccttactgaacttcttgctgtatctgctcatatcaaaccatttcacacatttatgtttgcatgttcgtatatgttttattttttgctagtaattcttttgcctaattcttgtttatctgtcaagattcaattcaggtgtcatttcccctgcaaactatttcttgatctgccaaaaagtatctctccttatgctgtcctggcatctgtctactgggcatttactgttgtgtattggaactgtgtgatgacttgtcttgcacatttctctcttatctgctcagagccagagatcatgtcatactatgtctgaatctttttaatgctgatattctgatatatgctttgcatatagaaaataataaaggtttattgaaactgataaaaataatctttttatatttagtcattcagaatcagctaggcagtccacttctgactaaaaaaatgaagttatttttctgtgtgtgtagtagaagttcagtaattcttctgaatactctattgtttttaagatcttgctatattaattttcataattgcatatttaagtctacttaatttcttcatatgacaaacaattttcattttattttgagctaataaggttaacatgattatgagttgtttacattttgtgaaaagttttactttttaagtgatcaaacatctggtattttccaatagtggcagaagtagtattacatcactgttagagtagcaaagaaaaaaaaaaatggccgggcgcggtggcttatgcctgtaatcccagcactttgggaggccaaggtgggcagatcatgaggtcaggagatcgagaccatcctggctaacacagtgaaaccccattctactaaaaatacaaaaaaattagccgggcttggtggtgggcacctgtagtctcagctacccgggaggctgaggcgggagaatcgtctgaacccggaaggcggaggttgcagtgagccgagattgtgtcactgcactccagcctgagtgacagcatgacactctgtctcaaaaaaacaaacaacaacagcaacaaaaaacttggctttggctttgtattttctgtcacttctactcttaagataaaaaaaaatctgagaccattacctatgatggattatcaaatattttcatcattgtttttctgagcatttgtttgagttttaaaaagttttgtagataataattatttgctaagcaatagtaattcttaagtaatatgattggctgagtggtaataattcatagtttaaattctatttgaaatgcagtctattttgagctttgcattttccctttaattcttaattttatactagtttttgaaatatgatttgcagaggagtttaataaagaaactgggcagccccttgttggtatagaaacattaccaccggatttgagagattttgttgaggaagacaaccaacgatttgaaaaagaactagaagaatgggatgcacaacttgcccagaaagctttgcaggaaaagcttttagcgtctcagaaattgagagagtcagagacttctgtgacaacaggtttgtccatttttattaagttgtgtttgattatcaatattatttttataataagatatgctcattattaaaaagttttagctatcttaaagtgtgaggaaatcagtagaaatcatttcaaattccatcactcagattatcacagttaacaatttagtttacctttttgccagacaccactgtatatatttatatgtttttcaagataaatgagataattctgttgactttccctctacctactctgcctgtgttgggtgggcttgaattttcttggcaagtagcagagaaagctgtgaaatcagcaagaaacccaaaccaattcactaaagctatcaagagtatcaattcaataaagctatcaagagtatcaattcaataaagctatcaagagtagtaattttaaatttggccaaaataatactaccggtatattcatatatactttgtgcaatagtaaaatactaccattaataactatttgatgtttttcggaattcttaagattaagagaaaattgaccaaaactatttagtatatcacaggtaaaaagtaagtgtatagacctgtaaaccaaagatataaatgcataaacatataaatatttaaaaacattattctgaaatgaactattagctgatgaaatcaataagtcaaagtaaacactgtataggaattaagaaaatagtttctagtaaaattgaaaatatattgtctttttattttcttaaaagattactcttcactgagttgcaaatatgttttagggcaacatgttttctggtatagaaaatgctatttctcagagaagctataaattaagcgcatatattttcctcaaactcatttgtctctttttataactgctagtggatattattgaataactttttttttttgcaagatctgcatgttttgtgttttaaggaagtagttccagcttttgtttgtttaatttcatctttcgcagacagaggtttccttgcagcattacctggttgggcttcagcattatcatttgaactttagaaggaattattacttcaatagaagattgttttacagtgctacaatgtagtattgtgactgtcgcaggcatgcacaaatctgtccagatacttaacttattttcatgtagatcaaataattgtcgttgattttgatcctgagaggcagataattcagcattttttaaaaagataatggtatcacagcaacatttggatactacagtgctatggagaataccaccattatagtggctggtgaactctaccattatgtagggctgcacttttcccccacgtgtacaaggctaccgcgtagagcaggtgaagctatgtgggtccacaacaatgtagtttttagtagatgtcaagaggtatctaagctcaaatcacagtgtagtaactatattatagttcctttcatttttaaaacatttctgtccctttgtgatttcatgctttgcattctgtacatattctttccaaatcactcctcagaacctgccccaagatggagctactgtgttattgttcccttaacatttacttattccattcacatgtgactattcttgttattagtgggaggaaggggctgcatagtgtactataagcagttgtggtacctaagctcccagacacaggtgaatcctccattcattggttaagctccagttttattcttggctcacctatattttgtgataccaaaatattaagttctatatatcctcctcctcttcatcctgtctgtttctcatctctccaaattttcagagttaacatattttatttctgcttagtcaaacgaatacatatttccaactaatattcctatctattaaggactagccttgccccatcctcattttacatttgtcatcttttttctttctctgtgaaaagaccatgtgtgcataactgcatccattttcatgatcaatacatctgaccatacactttacatggtgttttgtaatttttaaaaaatgcagtactaggtattggacatatattttcatgtctgtttttaccatgcaaaataatcttagaatgttgatatatttctgggaggaaccagaataaaagatgaagagatggaaatggtcaattcctattcctagataacttttatagttacctttcagcgtgggttatttagaaagcagtggtaatactacttctgtaggaaacattgtatcctccatagacttgacggaaatatgcacttggtttgaattagtagaagtagaacatgccaagtccataaatttacagagtgagattgttgtttaaaagattggtttctattactgttatctttgagattatattaagaaatttgttctctgttgcaggatagtttcacatatcataattgaataagactaatgtttcattagaaccatttattccctattattaatagggaaattttattttaatgtccatgccatcctcttctgattcttctcatggttttcaaagtaagtaatttaatttggtataatacttccaggatctcaaagcaaatctgtattttaatctctcaggtgttcactagtattaccagtgactagtggaaataataaaaggaaatcttgttcataaaatccaacagaatgatttttttcctccctgcaaaatcttctcgttaaagctgaaacataagacctcataaaattcaatttctactgagtgatattccaattaagagtactaattcatattatattaatcaaattagtatttgttcctcttctgctaaaatgtgatcgagaaattcatgcgtatcagttcaccagcaccattcgttccctactgagataataaatgatgggaaagtattttttggttcatttcatgctgcttccctagatctgcttactgcaaaggcaaacttacctgaatacttttgttgagattttcagccagccattctttgctgtcagtgtggggatcagaatgagtaggggagcaaacttacctgaatactgttgttgagattttcagccagccattctttgctgtcagtgtggggatcagaatgagtaggggagcaaacttacctgaatactgttgttgagattttcagccagccattctttgctgtcagtgtggggatcagaatgagtaggggagcaaacttacctgaatactgttgttgagattttcagccagccattctttgctgtcagtgtgtggatcagagtgagtaggggagcaaacttacctgaatactgttgttgagattttcagccagccatcctttgctgtcagtgtgtggatcagaatgagtaggggagcaaacttacctgaatactgttgttgagattttcagccagccatcctttgctgtcagtgtagggaacagagtgagtaggggagcaaacttacctgaatactgttgttgagattttcagccagccatcctttgctgtcagtgtgtggatcagagtgagtaggggagcaaacttacctgaatactgttgttgagattttcagccagccatcctttgctgtcagtgtgtggatcagagtgagtaggggagcaaacttacctgcatactgttgttgagattttcagccagccatcctttgctgtcagtgtgtggatcagagtgagtaggggagcaaacttacctgaatactgttgttgagattttcagccagccatcctttgctgtcagtgtgtggatcagagtgagtaggggagcaaacttacctgaatactgttgttgagattttcagccagccatcctttgctgtcagtgtgtggatcagagtgagtaggggagcaaacttacctgaatactgttgttgagattttcagccagccatcctttgctgtcagtgtggggatcagagtgagtagggtttttttttctgagtgtgaacagcacaccctacctaaggccacttaagagacactggagtcagaatctctggagaaaggatctgatacagtgctatcttaaagagatcttcagataattctgaggttaagcagcatggctctaggctgtatttataaaacagaaattatgctggagagaagagcgttgtccgagttactattttacttatattactcttgtcttatccaagaagtatctgaagtccttacaatatagcacacccagatttctttaaaaaataaggaaacactagtgaagattggaatgaagtgtattgcgtaaggttttataaatttctctagaggaagcaggcagagttggctctggaacttctctacactgtctacaagttaaaaataagctgatgttccaggagagtacggttggatcctgagagtaagacctggtagaataaacagtatcgtcagtgttctcagattccttgaaagcaggaactaggtgatattcttttttttttttctgagacagtttcactttgttgcccaggctgaagtgcagtggcatgatcttagctcactgcctgccgggttcaagcaattcttgtgcctcagcctcctgagtagctgagactacaggcatataccaccacactgggctgatttttttgtattttagtagagacaaggcttcaccatgttgatcagtcttgaactcaaattcctgagctcaggcagtcctcccacctcagcctcccaaagtgctaggattacaggcatgaagccaccatgccaggcctggtggtgttcttatttatatctccagcatctagtataataaacgacatatgatagatgttccttgaaagttttctgttaataagttcattccctatggagatttccaataatgaatttcttaggggtgatcctcagtgtaggagaacataaaattttaaagtagaaacaaaatagtcacacaataaggaggcaggccaaatacatggggtgaggatgtagctctttgtcccggataaatttatggtttgactctggtttctaaacctctctcccccacacccctcagactttcttcggaatggggcccaggaatctgaagtttcaaaaattccaccagcgattctatgcaaccacctaagcgtggctctttgtaggctcttacagggtattgtggacttttaaatacatttctagaaatggatgcactgtgtatctctcaagcagtccgctttaaatcttcttcagtgtgaacgtaataagtattgacttactagtaagtcaaaaaaataaagacttctgaaagatatcagagatgttggtcttatttttatagttaagagcaacccttactctttaatagaaagccaattggtggtaaagttgaccttcttaaaagattgaagaccataaccaggaaatatgcataagtaaagcacccccaaacctcctcaatagcctgtttcaacatgaagatggacaaaaggagcagactcagagttccctcagaatgttgagttgtcttctataacagctagagaagcatggccggaaaatcactctgtggaggccagtcatttgaaaatcctagagaaatacccatagaacagatgagtgattggagagagactttaggaataaggatattatttacctccatagagaactggtcattcatggtgaaatgagtgcatttaaattttttgtttgtttgtttccagtctcccagggtttcaaaccattgtgggtttacctaccgtgactacaacaccactcatctaagttccctgggaggtatatacacagggaaaaccctagagaaaattgttctgtatggcatttagggaatttatagctgtgggccactagtgatggggtttttaatagggttagaggatgaacaacaattgtattatatggtaaaagccgaacttgttctgctgttgttcctaacacagaaatagaaattactaaagtgtatggtagggtattagttgcgtgagccttccatacagaacaacacaatataaccagtacatgttacattgaatagagagtaattctttttgtttaaaaatatgagtaggtaggtacagtctggaaataatgtatcagaaatattaatagtgcttatctctgagtaatgcaaagagttttaaattttccacatttttcttgtttgttctagtaaacatttttattctttggtttgataaattgaagacaaaacctctttttttgtcttctttgacagtttttttatacggactttattttataatctgattcccttgtaattcttctaagaccacttccctgtgagtagcctgtgtttcatctacaccagattactcatcgtttctattgcatataggaaattttcctgtcattatggcatgttcatgaagtatccttcatcttaaaaatgttcttttatctttagtgttcatgaattttttcatattctttaagatcttcctcatatcccagagtctttgtgagtttctctgagagcacttctctagtagctattgtcttttccctcttaattccaaccttttcttactaccaaatgtattatgttcttctctattgtacttatattttggcttgccttccagtgtagagtctcatatatagcagggattttatgaatctttgatcagaccttacaatgtgctattccttctgcctggaatcttttctattcttttctccaagataatcctctacaaatccttcaagactcatctaagttagcacctcttctagaaagtgtttcttaacaggcagcattatctcaagtatgtgtattgggtccacagtgcttttataaaaccttgtgcgtaacttttattgaatttagcacattgtattataatagaatgtatatttatcagattttactcagagttccttaaaattagtgaagtatgtaatcttttttgttttttatatttttaatacctaatatagtactgaaaatggcacaggttcaataaacatgttgggaatgcaatttgaattttttgtttccaatctcccagggtgtcaaatattgtaggttcaactcccgtgacaacgaaaccactcacttaagttccctaggaggtatatacatagggcaaaccccagagaaaattgttctgtatgacatttagccagaagcattcagtgttactcataacgtttttgtactcaaactcctttatggaaggaaaccttggccctggtgacctaaggtggatttgacatgtgttgatcagataacattactcttggtcctaagaaccaattttacaaagattctaggtttcagtgggtcattagaccaatgtcagaccagatggatttattgctttaagttcacatccaattattaaccgttgacattatctgctatggtgaagagaggaagagtgccaaacacaaggaaaagttttatcaacaaggagtttctctcccagccctaaagcagctggcatgagccacctatcatgaagtcttccagaagcagaagtattgctaagctgatggtagccaaagattttctttatctattactcatgggcattgaaaggctattgcagtccaaaatcaggaaatgatttaatgaggacattaaacttcttttaacttctctccttcctttttgtacacattgtaagcatcctcacctctggttttccttatcacatagttttacctccatgatcttagttaactctgtcaaaaacttggtgtgttcatgtgcagtctccacacctttgtgtccaaaatatgtcttgattctagccaattttgtgtccccctgttgctctctctcttaatcagaaagcacatttatttctttttcatgttgctctactgccttctattaccttcaccgatctctagttttactttcctctctaattcgttcttcacaatatccccagaataattttttaaaaactgctatgttgccattatattatgtactatattatatacctgcatcatctcttgccatttctccactctcatactgtagtccagtcatattattcttttttttgaatgtagtccatgcttactgcatggactctccattcttccacctggaaaaacagctcattcattattcagcttaataggtcactttaggtcacatccaaattgctcacatcacttcactgccattgttcccatataaagtgttataatattgtcaaaatttatatatatgattatttggttagtggtgttctccacagatgactgtgagcttcatggagacagagactggctgctttgtcagagactcactgagataaaccctttaggtcatgtaaggattttgggcttgtctcatctagggaacacccagtggatgttcattgtacattgttggatatataagtctggaactcaaaagatggataggagatatcgtgaatttttattggtaccagtttgcctttcctctgacaacactcagctactggggcaagtacagaaaagatggaaggttaggttcattcagggttaagattttgtcaggaagtgtgaaggaagatgctgtggccagagaaaaatagctcctgtgcactctatggaaagtcagcccaagattgctgttcaaaccaaattcttttggtaaaatgctggcaattttccaaaatgagcttttgttatttctcatggcagaaaaatttactgtgaattccttaccataaactataatgagagctttctttcataattattggagtactcttagttctgggtttttgttttttaataaattctgggaagaagtgctatacgtggaaagatatattttactttgaatggaagactaaaattggttcttacataacttcagacatagaaatgaataaaagatttatcttagtatagactctgtggtttatattagatatataattgattcttttctcatgaagcacaagcagcaggagacccagaatatctagagcagccatcaagaagtgatttctcaaagcacttgaaagaagaaactattcaaataattaccaaggcatcacatgagcatgaagataaaagtcctgaaacagttttgcagtcggtaagaacttttcttttggctctctgaacatagccatggtcacgacatttcctccagtatagtggagagggacctgtcagggagtcaggagagacggggcccagtgatggctctgccatgggcatgatcagtgaccatgggcaagtcatctcatgcccaggctgtgatttcctcagctgtgattttaaagacacttttctcttaagtttctgtctttctgctagagaattctaatgaatcataatcatagattaaattgaccatttgatctggaacttaaaaagagaagtgtaaaatttagcagtatttctcctgtctctcacccattcctccatctgtaatctgattacatgggaatagttgagaatttaagacctaattgtcataatttcatgaaatgtgtttaacaataaaactactagatactgtagattagagtattatttaaaactactagatactgtagattagagtattattagaaggataagtaggatgttgcaaaactgtttgtgaatattttaagaacgtcctgtgcaaaaacgtcattaggctactctattgtagttttcaactacatctttttatagcggtaaattgagcatgtttggtgttatactgtgttatcagtgaatatggcattctgagagaagctatttcaagaatttgttactactaaaccttttagttcctgtagtcatttatcttttattagtgagcataagcagctctaatgcagattttgtggtagttccttttaatatttgaagattccccttgacaactaaaaagagtacgacatatcataattttacaacacgtaattttctgcttagtaagtgaattcagtgccagcaataacctgctaattgcaatgaggccttaaatatataataagacttcctttagccaaaatgttcaagagatatggtactctgttaattttgttttgatgaactaaataacaatacaaattattttttgtttgaacaattttgaaaatgtattaatatatcatcttattaaaatgtattaatttaaatagatatttgatgattccaaattttgcaaatgccttagaagctttaaatgaatttgatgtgaacatcactaactctaaagcttttcctggaaaatgctttgtttagtggatctgggatgtctgcttcttgggtgatggtaagaggaaaacctagggaaggagaaagaacagaggagtaggtacaaggggaaatagttttgtctgacaaaaactgcatttgcaaggcctctgctaattagaacttttatttgttaaaggcctaaattatgattaatgagtgtcactttttaagctggtattagaaaaccaaaagcattacttagcttaatgtagaatcctgattttaagtttggaaaatcatatggaatttaaatttgcagaagtcagctaaattttgattgctcagcttcataatatggatatcgtcttataaggtagcaacctactacctcatctttacttcagaaaggaggatgacagggagactatatgatatagacaaatacactatttgtctattcatttaattgttttctggagtggcatccacagttagccccattgcatatgtaaatcctgaagcaagtctgagaattcattaaccgtggcttgatcttacagtcagttgcttagcgtcatggtaactacttcatagcggtttttttcatttaaacttagcgtacactagaagctaaattgcacaggtgaaaagtatcttcagactttgggattaaacatttctggattttggaatattagttttatttattatgaatgcaaccttgaataaattgccaaatttctccagatagacctcagtcttcttttccataaaatgaaggtaattgtaggattagtcaagagcattatttgtaagtgcctggcatggcatgtagtaggcactgagtaactgttggtttccttctgttacatcagtcctagccgcttttcaaatatgcaatatattaaaatcaactttaatataagaaaaatttcctggaaagcgtagaatcatggaaattagagaaagtcttcaagtgtttaggcaccctgctttttagaaaaatgtctttaattttaaatggaatacttaggatattttcaatatagaagagtagaccctgagaaaaagtcatgcatagtcccactcactactcatagttaattattgtaaatatgttggtatttatttcacttttattttaatatgtagatttgggatttatttttatagttgagttgcatacaaaattttgtgttgccttcttttaatcacttaccttttataaccatttccccatgttgtaaactcagtgaaaacatttagtggctgagtattattccattgaataattaacttcttgtttatgtatctgctactcaatcgtatatttgtgtctacttttacattataaataggctgctagaaatgaaaacttttttcatatttcaggttatttccttagaatagatttcccatgctagaaatgaaaacttttttcatatttcaggttatttccttagaatagatttcccatggttgaattactagcttaaaaggtaaaggcacattaatgtggccgtggacttagatagcttttttgtcacccttcttatgagaccactttttaagaagtcatataattaatggatttcaggcaagtcataaaaatcttcgtattttaattatttttgcagcatattaactgagaaacttatttttaactcttttcaagtttagcctttgttaatgtattcatataagacctgaaaacaatagaaaaagataaataaacatgtattttactctagtgagcccttaaattctttacatggaaaatttttatggtactttgggatatctaaatttggcaaatgatactacagaattattatatgtggcaaagtttcttccccctttcagcttttacccatgtatttaatcagcattatgctgttgaaattcttcaatagtaactgaaaaggtttataaaacatttatgttccctaagtgcaatttttttcccccaaagggaatctgttttgtaaggattaatattctaagtgataaccatttgcttcaaatttatattttcttttcctaagatagaattgttttggattggtttgctagtgagaaatcatcaccacaaactccgaacagatttctgaatttacctgtttatatttcactcttgtgtacagagacctagcacagttcgtctcttatatgctagaaagattaaaaatccttaattaaatgtcatggaccaagcacatctctgtagaatgtgtgtgatagtagtattaggttaaaattattcaaatataaacaatttaaagtagcacaacaaagtagtacaatgactcatagctgtcattttatagaacagccgttacatacctggtgttggcttagctgcatattatctctcatgatcatgatacctgttcatgctgatcatttcctgttgaaaagttgtggattttgataaattaaggataagttgtggattttgatatatgtgtgtgtgtgtgtgtatatatatatatatatatatatatatatatatatattttttttttttttttttttttgagacagagtcttactctgtaacccaggctggagtgcagtggtgcagtctcagctctctgcaacctccgcctcccaggttcaagcaattctcatgcctcagcttcccaagtagctgggattacaggcatgtgccaccatgcctggctaatctttgtatatttagtagggacggatttcgccatgttggctaggctgatctccagctactgacctcaagtgatacgcccatcttgacctcccaaactgctgggattataggtctaagctaccacgccatgccaaaaatagtgtttattttaaaaggggcagtaccagttgcagctattggttttgttttgttttattgttcagttaaactctttttctatatatgcttccaggaagccaggaaatgttcacattgctaaaatttacccatatttctaatggaaatgaaacctctttaattgctgttataaaaatgttttttgtaatatcaaaacaaaagtttatctttgtgtatgaaaacttatgcaattcagttacttaagttgttttcaagcaccttcagtacttttggcttttttaataggtaaatagtggatatgctagttataaatatgttgaataagataaataagtatgtaaacatctgtatggtattttgaatgaatcatattagtgtcatgaagttttgaatgaaattttctgaattttacactgacttctgtattagtgtagattactgaaatacatagaatttgttaacaataaaaagaaaaaaaggaataaatctgattgagttgttaaaaatgggtatcagcttccaacagctttttcttattttcagcaggtgtttgttgaacacttaagatataaatatactggagcctcataggctgtatataataagttaaacaaaatagaatatggatattaactggatacacaattgattaccaaaaacaatagaaggataaaattataaggaaaaaaaccctacaaattctgatgagtttagaggaggtcatatcttattttggttgagatatcaagaaaggtttttgggagctattggactttttaaaaaattgtcagctatacagacaataatagaaaatacaactccactattttttatcttaagtacttaaagttctaaatactttcagggaaaaatgtaatgatattggtaatacccagtttgaggatgtaaagggaaaactgcagattttgtattactacttgatgaatgcatttgcttctgatgttcagttttaagtggtttcatttgataccaagtcaatgcaggtatttttaaaagatttaagagtatgtgcttaaacagtttaatagtgcatgtgcgttggaacttttaaaaataagtcatatggatacagggctgctgcttagggatgtgcaggttatacagttgtgcaaggatgccattgttctccactgttctcttttctaatgtttatattaatgatttccttctgcagaaacctgaaaatactacaagccaaccactttctaatcagcgagttgtagaggtggcgatccctcatgtagggaaatttatgattgaatcaaaggagggggggtatgatgacgaggtaccttttacagccctctgcaccattgctacttaacttttgctatttaatacaaatactttgggcatgcctgcaccctcatacttaatgtctattgccacataacatacagctttgccccctcatagtccaaaattactttaccaattattaacagaactttgaatttcaaatgaaaatttaagtagaaaacttatggaatttgtcaaaagaattttctgtttgtggagttaattcttttatgcagaaatagtaccagtttacttccaggttggcagattacaataagatttgtttaattagtacaaaaattttttgcatttaaaaataattttttatattccattcttgttttactggaattacttataatccttttcccactatctcctgccagaaaatcccacagcatgattgcaggatggataattgatatttttgcttctacagcctctccatgtgactgtgagtggagtaagtcatcaccgttactgagtgcctaccgttaataggacctccatgtttattcttatctcttcactgttaattctcatttacttagttttccaacagtatggaggcatttttgtttttcatgatttagttctttggaatccagatgaaaatgatctattgtcttattctatcagatgattttctccccttttccacttttctcttgagacacttaatattactctttttgaggaacggccagtaaagctgtttttgaacaggaacacagaggaggccgtaactattgggtagtgggggaggggggtgatttggaaaaatgcttgttggattctagtttttgtgggtttgtataagaattgcatttatgttaagttttttttcacgtaactttttttctgacttactccaatgttactatcatgctagagttaatcaccaaagtcagaagtgtcataaagacatatcactgtaccagtgtaagaaatcacacgccataaagagaataagcagatttgtgagataaactggtcagagagttttctcaagcaggtgttagatatattgcaattctcagtatataatccaaagtaaatacaatgagtaataggttcagtgaatcagaggtgacggaggcaatctcttgatttctgtaagatagcttcatagggctttgagtaatttcactttgcagatattttaaaatgtaaacagctaaaaataataagctattatgaaaacaaaaaaaatgcttaagtatttgtacttaatggctctacattgttctagttaactattttataaacatgctggctcttgaaaattatgggaactggcatgtttttaataaacctatcaatttattgattaagcagttaagtacttgttttaggatgtgccctctctcatttaaaaaagttgaattgtgattaatcatttaacactatcttttttgcaagtgcttatgtgacagagttgtgtgttttgtcgttttttaaaatttattgcagtgacagtttaacagtgcatgtgcattggaacttttaaaaatgagttgttatggatacagggctgctgttcagggatgtgcaggttgtacagttctgcaaggatgactagacaaggggcagaagtgggaagcaaattgagttcatgatgagctctctgaggcttgaggaagaggtaccttttttaattggtaaaaagggatgttgctttttctaaatagttcactcagaggatagcacatttttctaatttgtttgtctagaagcagggtgcctttttcaaattctccaattcagagaggatgcctttttgcagtttgcacaaaggctccgtatgagccagctgtgccctgtatggatgatcttaaaaggtgcttacatgcatattggattaaatttggtattaaaagtgcaacatttgatttataaatatggaaaacaaaagagtttcagcttgcatgtgaataaattattttagtttaaaaacctttttttaatgttaactatcttctgtggcagatcatgatgacaccgaacatgcaaggtattatcatggcgataggtaaatccaggagtgtatatgacaggtgtggccctgaagcagggttctttaaggtacaatgaacattttcattttcgtgtcttttctttttcaaaattaaacttcttaaaatattttatttctttgaattcagtttggttttctgtataatttctcttttcctatcttagttatggccaccggatatcctagggttttattttatgtattaattaacctaatactgattgtttttctcttaatccaggtaattcaagaaaaaaatctttttatttgagtcactctaatagtgtgcttttgatttgtcagcagaaatttgaattgtattttttatttgaagggaatgaggacattaatgaacaataataagaactgagtaaattgccctggtaatagtttattttatcttcattgttcatattattggtcaatatcataatattctttaattttattatcattaggtactaaattgctttttcgtttataaaatgatttatttattatattatttttgttatgtttccccataattaatttttgataacctagtcagttcaagacatgtgagaacatcaagctgaacacgattccatgatttacccacatctttttccctctaatatcagagctttacaatgttttgattacaattttttccttttacagatttgaaagatgaaaataccatgtatgttttgtcattttatttacattaactgaaaatcttcaagtttttttttttttcactcttttcaaacccttcttagtggttttaaaaagcagcttttttgaggtccagtttgctacagtgaactatgcatttctttctttttgacattaaaaatctaacatttttcattttctgtattttgccattatccaacttggtctttcaaaaactggttcttttttcactgtttctttcagtatacagtacaaaacaaaagccttgtacatagtagtagacctatcaataagcatttttgagtttgctaagattagggtgactaactctcctgatatgcccgggactgagggatttcctggactacaggatttaaagtgctaaactgggaaagttctaagcaaactggtcccaggacaagttgatcaccctattatgatcccataagaaaggttgaaaatctacttctaaaaaaagaagaaaaatgtattttttatagttttctgttttaatacatttctttatagtttctaggtttctaactggcttcctaatttttaccattagaaattccttcttatgcccagatagtctacattttcttttcttaaaaaaaaaacactgaatatatgtcctctaaagtatttatttcttgtggaaaagttatttatgatttacagtgccattgtcatttctgaccagattgggtcttcttatgttgaattgcaaatctcatttttattaagttaatatctgcatataaataatcacctaattgtatatattacaacagttagtaagcccccagtggataatgactttcagttatttaatctgtttggcattaattcatatctttaaatagaatatttgggttttttattcacagtttacacattacctgttgaatttgcttctgtggaatatgaatgatgagctctctttcttttcctgcgtcgcatacatacactgagagacacagctcctatcccccatacacacacacacacacacacacacgtaaaatcttgtaattttgattatatcagaattctgcatttgtaatattattatgtatgctatatgtgattgagttatattataaatattactactttctgtttttcccttaacttttgttttccttaaacttagttgttttgttttttggtttgcttagtttatgtgtattactgatttagttcaaagctgtccactgcttgtttaaatctcctctcattctgcctttaccagttttatcttcttgggacatctattctggagctttatgacctgccccaatctgtattggtttttcttttctcctgatccataactagtaacttgagatctcctttcaccatcattctggggattccctttgcatcctttcctttgtgtattttccatatttcatatatttttctttattggtttgctctatgattttgatagtacagcaagaaagcatgggcaagaatcaagtttgtggaagagggacagagcattttcttaaataagttatgttatattgcaactctcagcacataatctaaataaatactgtggttaataaacttcagtgaatctgaggtaaaagttttcaagttgctttggagattgagtcgaatttgacgttttactcatagcataaggaaactgtgctctttgtcagatgttaaaaataattactacagaatttctatttcactaaccattctccttactatcatcatactccctttcttgcttttttttttctgctggaaaaacacttacaagaatagtgggaatgtacattaggaaggaagtagtttatatgttgatattagcagccagactgcctgggccgactgctttctagctttgattttgggcaaattattcaatctttgtatctcagtttcccgaggtgttaaataactatttattttattgagtcattgtgagctttaaataaattgtatcaatgttacgcttttaaagtagtatctggttgatagtaaatgctcagaatttagctgttattgttgttagtattatcacgaagcttatcttatgtgtccagttctggtccacatatagtcggagatgaaaaatgagaaaaatgaatgtgccatatctgtgtcaaggacctttatttgctaatagaatttttttaactcatttgttagaaattgtcagtaccattttggagtaacaaaattagcagttttgtttggcttaacctaataattactatcataaaaccctctttctacctttttatgtctttagtgtgtgtatatgtttataaaatttctgaagtttgtgtacatttgcacctatctgtgattgagtaatacatgagtgtaacccctttatgtaaacatacatcaagttgtttctaattaatgcatgtttttggtaaaggtagaagcatttggacacaactctagctgataatatgtcaccttaaaaattttttcgtataaaaaatgaaagtaatgtatacaaaatgcagttgtattcagtaatatagaggtgtctaaaataaaactaacaatgacagtctctgccactgccatggccctattgtaaccattcttagcactgtgtatcttgtttttttctttttgtttataacaatgcacatatacagagacttaaaatttttttaatgtagattttactgttcataatattttgtaacttatatcactcagaaatctattgtgggcttaaagtttagacagtatcacattatctttactagctgtctgtatacacacatacacatgtgtacacatgtgtacacacaggtacacacatgtacacgcacacgtgtacacatacatgtacacacacatgcacacatgtacacccacacagtattccatgctatagatatattctcatttcttgtatcttaccctctttatggacatgtgtcctatattttctcccagtctaccatttctatttgaattagtttagagtactttttcttaaacaggttttaaaatagtatgttcgttttcctactttatggattttttttgccatattaaaagatctactcttacccaaagttatataaattttcccactacttacttaaaatacttttcttagtaaatttttattttttaaattcaaatgcttactgtttaactcattagcattttatttgggctttctgcgttctgtattaaatgaatttggtgtttttctattttgtgctgtcttcatcaagtttgcaattagggttatgttagctttggtaaatgaatttgagagctttcctgttttttttaatacttaaccgtgttagcgttggaatgatctgttctgttagttagaactcactcgtaagatcatacgagcctagcgccttcttgcggggtagatcttttaacacatttttttggttcattccatagttattggcatgtttaaatattcttcctttttttgattgattctaatcatcatcatcattcagtattaattcataaaatatgtacacaccatagaatctaacatatggttgctgcttctgtcttcctgtttcccctcaattagatatagtatttttaaatttttgttcttttttgtgcttagtgtattataaattgagggaaaagttgtttgttttgttttgttttgttttgtttgaggcaaagtctcactctgtcgcccaggctggagtgcagtggtgcgatcttggctcactgcaacctctgcctcccaggttcgagcagttctcctgcctcagcctcctgagtagctgagactacaggggcccgccaccacacccaggtaatttttgtatttttagtagagacggggtttcaccatattggccaggctggcctcaaactcctgaccttgtgatctgccctcttcggcctcccaaagtgctgggattacagatgtgagccaccacgcccggccgtgtttttgtttttttttaatatctcttctgtcctgccacgtcctgaaaaaatcttggtcgggtctattttacattagctttttggctatgaaagaaagctttttaactctgtgcctgtttaggtacttctgaatatggatttccttatgtattatgattagaccaactttttaatactctgaatgtttgctagtgataagaatagtgatgccactgtcagccttgttataagaaacttaggtctgagtaagtggacttgctaaagtttaacctccgaattaggaagttaccaacccagtcataggaactctttcaaccacaggccatcatcccacgtgaacgtctacccaataagaatgcagtatgaaaaagttaataggcaaagttgatctggaaaaaaaaatgcaatgggctacactacactaacttgagtccttcttcaaattgactttaatggttaaaactagtttctactatagaaaatccccaaataatagtggcttacggagagaagattctgttgtgtaaaaatgaaattcagaggaaagcaatacaaagttactatgataagcaaaaataaaagccagaagataaaaacaaaatattttcaaagtactcgttgcttgtatatatgtgtagaggtgggagggtcatattataattacaattatgggattagtgtaagttttttcatttattttaaaagacattaaaatttctttttttgtaaaaattttgtcggtatcaaagtacccttagggttttattgaagtaatacttttgtattataaaaattttttcttaatagttgtttcattgcttcataataatggtgtccctacttgccgtaactttatcacccttttttgcttttgaaatgtctcttaatcaccttgtttattcaatagatataaaaatgtttattagaatataaaacatgttgaaaagtacaactcggtgaatttttttttgagtgatactttccttatttacatggcctttaaggaatgtgaagaggaagaattatttatcaacatggtattaatgaaatcttgttccctaaaggtatacgcaggcctaaatcgttaatgcaaaaaatatacttctccatgcatcttgttaaattcaagacagcggtccaacatttccatgcttagccaaagaagactcttttcctcttggttgtgtacatttgtagcctgagttttaagtgccacatctttcaagtcagttacacatcctgcctttaggctctcagacttgtacttccaactctgggttatcacagtgtgtgtttacccatgtgaccaccaactaggccaagaggtagaacaggagtactccagaagtaccttttttccgccttcccatcactacagtctgtccgtacccaaaagtagccattatctggacttctaacaacatacgttagttttcttgttggcctttatacacttggcatcttttactctaggtccttttttgtctgactgcttttactcaacagtgtgtttggagcttcatccatgttatacagttgtcatttcttccctctcatggtattttgttgtatgactataatttttttctatccttctgttgatggacatgctaaaaaggtattgcctgtttatatgcagggcattgtcctaaatccagggatgtagctgggataatgatggactgagttcctaccttaatgaacctcattttctgctagggaaagaaacattaattagagttattagtatgataaagaaccagtgtaatgtggaaaaagaacataaaataagaaaacagagctagtacctagagggcttcttagaaaaagtgacttgtaaactagtaatacataatccaaaatgtagaatgtaaatgtttttctctcacttcctaattctcactccacagtgagcatctattcattgtttcttgtatatcctagagagatagatgagactggcttacattcaggcattcatcctgtatttataatttaaataaaagtaggagtatactctttctttttttttctttttttttttgagacggagtctcgctctgtcgcccaggctggagtgcagtggcgcagtctcggctcactgcaagctccgcctcccgggttcacgccattctcctgcctcagcctcccaagtagctgggactacaggtgcccgctaccacgcccggctaattttttgtatttttagtagagacagggtttcaccgtgttagccaggatggtctcgatctcctgacctcgtgatccgcctgcctcggcctcccaaagtgctgggagtacaggcgtgagccaccgcacccggccagaagtatactctatttgcttctttttcttgagtttatttttcatgtatatgtaattattcatatcaggatttgtagatttatctcagtatttttcctttgtttcctagggtttatcaaaatttatttaaatattctcctagaatagggtattcatgttacaacaaatttgaagaaagttaatacatttccacccaccatagaggctgatgggagcagtatgtcagcacactgataacttactcatactctaatttaggaaactgtctcctactagctgttaccagcaaggtctccatagtcctaggtttaaatcctaacattatcatttaataattgtgacctcaggcaatttattaaattatcagaaccagtttattcacttatatgagaagttatcttgagaattaaatgagataattcacgtggaactcttcaggcagtgtctgtcacataaagaacacctaagttgttacctattcttattaaatttatcagcattgttgttgctgaatatttgagttattttcaatatcgtgaacatttttgtgcatatattattgaacacttgcgtgaacatagcagagttgacaagtcaaagtgcttgcaaattttaaatactagtattatcaaattgcctacatgtagttatattgatttattctactattgatatttgcctaaaaaaagacattaaaaatgtaatctcatatttcaaaatgtatttctttgatctttgtgagggtcagtttttttcataaatattttggcaattggtatttatgttgactgtcattcatctttatacgtttattacactgagtttcttttagttaagtgaacattgatcttctaagacaattgattcatctgtaatttgcaaattatattttgtggtttataatttgtcttttaaatttattttttgtgtcttactatacataattttttagatcttataaaatacagcaactctttttatagatttggtcctgtgatcacttataaaattatgcaaaattttaattctgctgctttcatggttttataatactttttgttttgattacaggatagaagattttagttttctctgaatagtaaaatatccagatagtctaaacataaaatactgactaatgcctccttttcacgctgacttgacacatatactaaatcatacctatactaaatcccttatcagggatttatacttaatgatatactaaatccctacttataagtagctctaactgggtctctgtattccactgatctagttttctgtttttggacaatacactgaataccagtgatcttattgtagatcgtttgtaatacactttcacattttgttagaagaacacttagtaatttttgttcttttataaacaggaagtttggcaagcctcatttttcttctgatgatttttaaaatcaattgccacttcctttccaaatccttttagaattgtatttatgtattaatttaacatgaagcagataattttttttttagtattttgagtcttgcccaaaaggaacatgatacgccttttcacttttattgtcttctgttgtgttctttagtgaggttttataattttatttcataatagtcttatgtccttttgtttaatttattcctacataattttttttgcctttatgaatagggtcatttacttccattttttttttaaccaggttattgaaagggtaggtaacgggataattaattttacatgtttatgttgtatttagttaactttattgaactctttgttttctaatggtttttcattttattttcttgattatttcagtaaactgtctcccaaaaattattttctatatctttatttcttatttcatttctggttttattgcggtgatcagaaatttttattacatattctcaatattgaaataatggtagtaggtgcctttgtctagtttctgattttaatgtctccagtgttttagtattatgtataatgtgtagttttggttccgctttatgaattttaaaatactctcaaattagtagataagggtttccagctaaactgattggtattgaaatttagaaattttataatatacctattaagatgctgaatagatttctccttcttaatacttgtaaacccttaattcttaataattgtaaaggtgttaactttgatctatgtttaaaaaaattattgtaaacactttttgttatctcatatattttttgtacaccacactgtttgtttaccaaaagtgggtgtgggtgttggcatctgggtacatagacaaaattgatctatagtttctttctttatatttgtcaattttggatatacaaattatatatatataatatatctatattatatagccttttataaccattaaggaggctttctcttgttttgttttgtgtttttttttttgagacggggtctcgctctgtcgcccaggctggagtgcagtggtgccatcttggctcactgcaggctccgcctcccgggttcacgccattctcctgcctcagcctcctgagtagctgggactacaggctcccgccaccacgcctggctaagttttttttgtatttttagtagaaatggggtttcaccgtgttagccagggtggtctcaatcttctgacctcgtgatctgcccatctcggcctcccaaagtgctgggattacaggcgtgagccactgcgcccggccgctttctcttgtttttctggctctgtggcagtttagatatcacagaaattatctgatccttgaagatttgacataacagcccagctcgaaaacatcgtgggcttgatatctttcgtgttaccagatttctagggcaaacttttaagttttacagagtctgttcagtttttctgcctctgaaagcagttctggtagtttatatttttctagattattatctgttgggatactgtagtctattaacaaagttatatgtgttattcttcaagaaattttaaaacattttttctgtattatcacctttcttatttctaccgatgagttttcttcccctttttggtcttccatccaactttttggaaagaaaaagcctttgactatcaaattgttacattatattttatttctcctactttatattttatttttctaaattcttgaaatcttttctatatttaaattggatatatatatgtatatatatatatatatctatattttttttttttttttggatggcgtctcgctctgtcgcctaggctagaatgcaatggcacagtatcggctcactgcaacctttgcctcccgggttcaagtgattctcctgcctcagctcccaagcagctgggattacaggctcccgccaccatacccagctaattttgtttgtttgtttgagacggagtctcacactgtttcccaggctggagtgcaatggcatgatctcagctcaccacaacctctgcctcctgggttcaagcaattgtcctgcctcagcctcccgagtagctgggattacaggcgcccatcaccatgcctggctaatttttcctattttttagtagagacagggtttcactgtgttggccaggctggtcttgaactcctgacttcaggtgatctgcccaccttggcctcccaaagtgctgggattacaggtgtgagccactgtgcctggcctggaaatttttttgactaacagcccaataggttttgatatctgatattcccatattagtatagttttttatttctttggctcaagaataatttagagccatattttaaattttctaagtatttaggttggaagatatctctatttataattcctatttgtattacagtgtggtcaaagaatatggccaatattatttcagtcctctggaatttgaagtaagttttcttcatttcttggcactgtcagtttttaaaaaatagcccataagcattttaaaatacacataaactctcttaaccaactttattttagagataagagcaatcagacttagaagattatgtgccttattctatgtcacaattaattataaatgatgtatctagctttttgaattttaatctcatcagtttcccattagatttaactgcctccagaatataaatgtttatatttttggtatccacatactcacatatatatatatttggtatcttcatatatatatatatatatatatagagagagagagagagagagtttacataaaaaattaagtccataagaagttataaatttagaatatggttttacagtattacttagaaaagtagaaaaaagtctaggtagaaattatttgcatctttagaactgaacaaggtctcaaaagcatgacttaaactaattttgctgatgggtcatctgtaggtagatggggaatgaacaagaaaggatatcacacatatggagaacttaagaaacaaaggcatgtgtgcatttgtgaggagacaagcctaacctagataggagggagatccttgttgcaggatgataggaaataagattgaataaatggcattaagcctgattaaaggtctagtgaaaaagttaaaaaagttaaaaaaattaaatagcagttctgtcatctaatgactagtatcacatttcattttgcacatgcgtggtgatttcattgcagtgtctgtgataattaacttaaaataattagcatagaccgccaaaaaatatgggcaaatataattctagaacaggattctgaggaggtagtatgagacaaatataatgttaatttactcataatggcagattgtgtagaactctgctaaatatactagcatggaacatctgttgagaatttgaataaatatgattccagtatattttaaaagccaaaaatttcttaaggaagtgtgtaaaaaatagttaaggaatgcatttatgctagtgaaaatgtttttttgtatgtttgaaaaacagcttctagaaatttagaaggtaatttcttaagaaggaagtgtataaaaaatagttaagaattgcatttatggtggtaaaaatgttttcttgtgtgattgaaaaacagctcctagaaatttagaagtgtctttctacctctgctggtttaaacacctatatactgaaaaatactgtgactttggcaatttgcttgtgaaaattaggagagtcttaaattcagcaaaatcaagaggtgaacatataatcttagagtataagaggttatatatttcagttctataatagaaatctgctatttattaaaacagcttctattttgaaagtaggtaggggaatgatgaccatttagtggaatcactccgtgcatgtaaacctgcaatattaatttaagagactcagtacaaatttgttttattttggtcatgctattttgtactaaagtatgatatacgaaatatttgaatattctaaaagtctattacaggttgagtatcccaaatccagaattcaaaatctgaaatattgcaaaatccaaaacattttgagtgccaacatgatactcaaaggaaatgttcattggagtatcatggattttggatttttggattcggaatgctcaaccagcataatgcaaacattccaaaatctgaaaaaaatctaaaattggaaacacttctggtcccaggtatttcagattagggatactcaacctgtagcctgtgacaatcattatcgaaggttcatatcaacaagaacagtaattgaattgttaatgttttagatttattctcaaattcttcctactttgattattatgtttggtctccccccttccccgtttttttttttttttccgaatttggataataggaagatttttaaagagctctaagagaagcttatgtgtgctacctaggcacacagtaagcgttgataatcttaaatattaaaatacagttgatatttatggctgttatttattcacataagactttggaatgacatgtatatcctcaaaaaaaaaaaagtcagttttttcaagggaaaagtattttaaaataatttgttctcttattctatttataatcttatgctgcatagaaagaacatattagccttcctttttaatgagtatgatattacataactagaatatttcatttaatgtttatcagttattttttctcccatctgtacaatacaaccatatagatcataacatctagacgtcaaagaattacttaagaaaggcatgcattttttaaattaaaaaaactttttaattgaatggattttttgtaatcttgcctgaagcccaaaatgtttatgcttattagagctagaatttacatataagtataatataaatgaatataaaaagctttatcttaatcatatggtcctcttgtacatagcaatatgtacaatatgtgtaaatctatacatatttctatatggtcagatattttctagattttgcttgtatattaaaacatgcattagtatttgttatttcccattattatttgtatattatgaggtatttttgtttataaagaaaaactaagtttaaaccttaaggtaataatagtgataatatattatcattattattcttacattaataaaatgtacgtactgttggagcaataaatacttctttttgtgataattataaccccggggcttgatgttgcattccttatttgtgggctattcagctaaaagttaattgcaataatacgactatgcatttaagaacaattttctttcagatttgagtattgttgggagctatatatcaactctagaattttagtgttcaaactgatgcttagaaaggtaaaacagaacgggaaaacttaccatctccatcttatgatgtctgtgaatagactttgactaggctctgataaattttacagaattactcacattgtaagtttagacatattttaccgctttcatgtgtggaagcaaaaagaacgtttatatagtgaagggataaagaagggcctttgtggccaggcacgtggctcacgcctgtaatcccagcactttgggaggccaaggcgggcggattatgaggtcaggagtttgagaccagcctggccaacatagtgaaaccccatctctactaaaaatacaaaaaatttagctgggcgtggtggtgggcgcctgtaatcccagctacttgggaggctgaggcaggagattcacttgaacctgagaggtggaggttgcagtgagccgagatcacgccactgcaatccatcctgggggagagtgggagacttcttttttttttttttttttttttaaaagaagggcctttgtggtcagttattcagaaaattccttgagtctatggaacatgggactgtgttcttagttgtactgccttgtttgtgatactttaaaagccaaaaaaaaaaaaaagatttaaatgcaagaagaattaaactcataatattgaaggattttttggtgttcaaataattaaccaaaattatcattttcattgcattttccaggcaattaagttggaatatgcaaggttggttaagttggcccaagaagacaccccaccagaaaccgattatcgtttacatcatgtagtggtctactttatccagaaccaggcaccaaagaaaattattgagaaaacattactagaacaatttggagatagaaatttgagttttgatgaaaggtaatttgaaagtataaaattcatatgctcaaatcgttctttttttttttcctgcagattcccaggataattttttgagtatttattttatatatgcatgggcacatattttaataaatacgtaacaaaatttgaactcaatgtgactagttgctggagtctgtggccttttgaagtttgaactgaaaataacttagatcattttaataaattttaattgtgaatcaagtaatcactgcacttattacactcaatattttagaaacaaaaatgggcttctcaacctctgtactatatagacagtttaaattagataaatctttgttgttggggctgtcctatgattgtaggatatttaataatatccctcatctcttcgttagatgacagtagcagctcccaagttgtggcataccaaaatatctccaggtattgccaaataactcctaggggagcaaagtcacccttattagagaatcactggagaaaagttttcagtcttgcagataaaataattaaacattctttgacataaagaggaggcttagaagggttaaattagattcacgcagacatattttctctggaaagagaaaatattctatagaaatttctgtagaatttctgtagaatatagaaaatattctatagaatatttccagagaatgttttctctagattatattagtagttttataaagaattattcagaaagtcctattaaactactaatgttaaaaatcacaatttaattagaatgagtgacactagaaaataatttcagggcccatgtgaaattttagagtattgaaagttattttcatatataaaaacatttatgctgttgcagttcattgtaattttaattctgaaatgatcatccttttatgagtgtctcaaaaatactgagttaaaagtgtatagcaaagaatatgaggggaggcaaagcatctggattgatcctaccttattagatatgtgccgtgaaatgtaggattctgtgcataatacaaataaatagttgtgaacaatatctgataggtggttgaatgctcagtgaatgttggccactactgtttatattagtagcagtgtggacatcatttattttgatacatgcgactgcagagagttcagaaacagggttgttgtgaccctcgttatctgtgctatcagtgtactgagttccattggatctatgctgtttaatttggagaagatattaatggagtaatcacattgacttttcagtcttttgcagttctctgactataactagttaatctgttttgataacctgacttgtgcttgaaagacagagttatgcacatgtgaataaatacatttcgtgaggatttctttatcactgattctgatcataaaatccagtgggatgtttccatttttacctgagatgataggcacgttttagactctttagtatttaagaataaataataccatgtggggggaaaagaagatgcagtgtctcttgagcttgcttaatagatgcacattattttttaaaagtttcatttttttcctatgcaaactgtgttaattagaatgtaatttaaaagccatatatcaatacaacacagtaaatttgaattagaattattgctcctgtcttctttgtaattccccaacattggtcccaaaaatgtttttcacttaaggttatttaggagttgtttctatacaaaagtactgctgtttttgctcagtgtttatggattttgcttttgatttacaaatatatatatatatatatacacacacatacacacacgctcatatgtatgtgtttttttttaaggtgtcacaacataatgaaagttgctcaagccaaactggaaatgataaaacctgaagaagtaaacttggaggaatatgaggtaatgtgctttcttagaggttaaactacagatttagggattctgtaattcactgatattcctttcgtttcagcccaactgaagttgaatttgttatgaatgatgagtaaaaaaattaagtttccaagtcaatgctcaagtaattaataattttatatgtgattttaggattaacatgatatgatagcatgtagaccaaaaagtttaaaatcaaaaaaggaagatttttggttttttatttcaatactaattctcaagtactttttaaatgaacttttctagcttaaaaacagaataacaaatgcattgttaattttgaaatcaacttagaaattgctgttacataataccaacaagtaatatttatcaagaccctactatatgccaggcatttgtctaagccctttacatatattaactgatttaattcagacagtaacactgtaagataggtagtgttcttattcccatttgacacacgagaaaataaggcatagagcagtgaagtaacctgcctaaggttttcacagccacaagtttacagcttggctaatagaacctacattcttaactgttgcactacactgtgcaactgtaccctgtgggctgtattttttccttcactttgattcatcagatatattttggggaagttaattcattttagtccctatatgccatatatgtttgtcatgagacagtgttgtgtgtgagagagcacttacataggtacttgtacatgtgcttgtgggatttttttgtgcacaaaattattttttgtcaactttggctttaaaatattctttattttaattgatgaattcatacacctagtatttcttcacatttttaaatttaatcttatgcattgtcttttttttaatttataagtctagtaaattttaagttgttttcttgggtgcctttgcttaatatttagttccatttacaaacttaattatggtactttagattccctaaataattagtgtaattcactacacaaacagggaagaggaaagagagagaaaacactcattattgatgaaaaccttagctagtttggcgtataaggtaactaccttaattcactaaagagtgtctctaaaaacaaaaataggaaataataaaactgcagcaaatatatagaattgtgagcactgaaagcttaaaatttttgttgtcaaaagcaaggcaatgaaaataagcgaaaagtaaaatactggaaaagaagaaacaaagacatcattatttgtagttttttttaccttgaaattcaaataaaatctacaactgatgtattagaactagtaagacagctttgcagcatgcaaacttgtgtcagacatcaattttattcccttttgccagtaaaaaaagtatgagaaagtataaaagtgagaccatttacaatagtatctgaaactatggagtatatagaaataaatttaacaaaaggtgcgtgtgacttctgtggggaaaattataaaacttattgggagacattaacaaagacctaaataaatgggcatacatatggtatttggaaaacttgatattattaatatatagatatcacttttcccccaaatgctttataaattcagtgcaggctgtatgaaaattccagcaagatgttttatggagcttgataagccaactgaaaaatgttacggaaatgcaaagatcccagtccacctcccatctctgacaagcaagttagtgaacagtataaagactttttaataaatggttctgggaaataaataaaatttgatttcttctttattccatatgcaaaaattcatttcaattgtgaaagactcctgtgtaaagctgtttagaagtcaacataggtagaagcccaaagacattcatttatccataagaggcactcactgaccagatatttttgaccaggatatgtaatctagagccagagaaattcaaaatttgttttctcttgaccctgaggagcaagtcaagtcatcttttagctaataatgactccaaatctgtgccctccacattgattgagagctcttcccttgtccccaagattcgtgttcatggaacttgatttttaattgtgacttgattctgcaatgcttccttcagtttgcttcaacagattggactcattatgttttttttcataaaatcttctcatattctaactgcagggctgttaaatcatacaagtatttaaatgacttgtttttagattctgcatattcctcctatctttgtcttgctctaagttcagggttcagtaaaccatagcctgcagaccagcttaccacctgtttttgtaaataaacttttattggaacatggccatttgtatacatattgtctgtggatactttcacactgcagttacagagttgagtaactgaagaagatgaggcttgcaaagtctaaaatattatctggccttttacagaaaaagtttgcctactcacaacttctaaggtgattctaatgacaacaaggaatgacagtttgaataccttccccagaaaagctaacttcatacttgcaggacaaattttacctttatttgttatgaagatctactaatagcatgaaaattatgtcttgaaaattaaaattaagactggatgtggtggctcatgcttataatcccagcacttttggaaatcaaggcacagggagttgtttgaggccaggaatttgagaccggcctggccaacatagcaagaccctgtctatacaaaacagattaagtaattaactggaactgggagcatgcacctgtaattcaagctacttgggagacagaggtaggaggattgctggagcccagaaggtcaagtctgcagttagccgtgatcgtgccactgcactgcagactgggcaactgagtgagaccctgtctccaaaaaaaaaaaaaaaagtttatattcaaggagaatatcgttggctaataactatgtttcttatttttgtttataatgtttatataaaagccttaacacttttgttatcagtattcactttccaatttatcctacattgaatttcagttatttttcttgagtcaattattataaagtaagctaagaaaatcttgactttggtatcaccttagaattatttagtcctattacatgccctatagttgttttgggggtggggaggggcattgaaatgtgaactgcagttattcttttaccatatctcatgtaaataaactattcgcctacacacttaaagtcaaatttaccacatatttgcgaagttaaaaggttaaataaatctaactttttttagtttcttaaaattatgtattaagtatgtgtccaagctttgattcatactcagcgtaatatttcattttcttccatcagttgatgtagatataataatagttcaataatatgattttatactgatgaatttttgagatgacctgattgattatcctgcctttatatttctgttatctgctagtaaaatctttattgtttaaaacatttcatatccatgcctaataatttttagatttaatgttgtattaataaatagtcttgtgtgccagaaagtaaagtcttgttttagttctgatgtatcttcattttgaactctttatttctattaattcagatagtagcgaaacagtgcattactttttgtacagtttcatagtactttttaaatcttactctgaacatttttaatattttctttcacctacaggagtggcatcaggattataggaaattcagggaaacaactatgtatctcataattgggctagaaaattttcaaagagaaaggtaaggcaaagtggacaaatatgaaaagagcataatttttgcacttaattctattcaggtgtgacctcatccatggaaaagattttattcatactctgtatttttaataaatgttttattttagatcagttttaaatttacagaaaaattacacagttgatatagagacttcccatataccccacataaaatatattttccatttaaaactccgtaaggttggcattagtgtctgtgtttattagctctcaaacactacccttgaagctgagtctgatcttgatatcaagtcagagatagtgtttgcagtctgtctttgtgaactttcaggttctgtaaaaagtgtagctgtagaaaatttttgtgtactgtgactttaaacaaattttggattaattttcatttaaattaaggatggtcttaaaggaatatctacttatttaattatactattattttaattgttattaagaagaaaggatacattttgctttacttacattttaggttatttactagtttgcatgtatttctccacatatttcttaatgcgtgttgttgaacattaacttccctagtgattgttttttgagaaaatgctttattttcaatgcagtgtatattgcagccaagtaaaagggatattgaatttttcctttcttttttgttttatgaaatttaagaagctcccacttaggtaatgatgcttctttttcaaaaaaagaaacaaagatcagtgtttaattctggagctatgctgtccaacatagcggccacctgacaaaacttaaataactaaaacttttaaaaccaaagttcagttcatcggttacaccggccacgtttcagtagttcagtagcctcatgtggttagtggcctctatttttagccagcacagaacatttccataatcacagaaatttctattggacagtactattctagaggacagtactttcatttttatattaatagttatcaaaatttttagttatcacacaaaaggaaaaattaatgttttacttaacaatttgtcttaagtacttaagtacaaattatttaaagtcctagtcattgtgctatttataagataatttcactttagtcattgatgtagaaaacttactttgatcaatacctccaatttatgagttatgtcaatcaagattttatttctttaataggaatattcaaatgtactattagaatttatatttgtgctgatttgagaaaaataatgtgatcgtataattcaatagagtgagatataaaaaggcatttcagtgttacagataaagaaatcagacttcacagagatgtagtaactttgtcaaggtcacacagctaactaggagaagaaaaattaaaatagagacctcgtattcttgtataatttaatgaaatcatgtaagtacaaaatgtattcatttatctcaataagaattaaaaagatgaaactgtcactttgtacctatccggatagcttctgtattagttgttcccagttaacatacattaaaggaatttgagatataacttggaaatatgtttaaatattacaatttgcttgtcagttttcaaatacatacttattcagaaagttaatattctagtatagtaaatacttaccaaattagaaggattaactagaaaatcaataatggtgacagatattacttgtggaatatcttttaaagaaatattggtgtgtgtgcgactgtgatcccagctactcaggaggctgaggcaggagaatcacttgaacccgggaggcggaggttgtggtgagccaagatcgcgccactgcactccagcctgggcgacagagcgagacactgtctcaaaaaaaaaaagaaagaaatactgttttttttttttttttttttttttttactttaaatctttaaatatagcagttattgtagctagctgtttgtaaaatattgccaaaagattctgtcaaaattgtttttaatgaaaatgtaaacatttaaaggcttgaatgaaatactgatggacccttgtgagtcctgagaacagtgaagtgaaatcatggttgcaagaaccataattttatagagtgtaccaggctacatgatcttattttatcttagataagaatatggtaattggactgctaaatcttattctaaatttatttgaatatacattcgtaagcactttaaagtttgataacatatggaacattttgcgtacctcagtagagaattggaacaaggtcatggtttcagagcaattctcaaagaggtgactcaggtctagaaagccagatgtcagtgtcattcaggagagatcttcttaacaggaaactcagtagctataaaggaaaagatagatgtgctagttacttattaattaacgaactactacaacttaatgttgtaaaacaacttttaatattatcacttccttcgtttttcataaataacatctttaactgagaatatgtttattaacctaatatcatttcaaaataaaatgttatacttaatctcaaaaacaaattcctagaaagccgttttcaaaaaatgtataaaatagacctatttatcatgacaccttcaggtgtgtaatttgatttgccatgaatgtatacattaatttttaaataattttacatttaacatttgggatgtggaatggatttattttgtatctaagtacatgaattaagtaataaacagtaattattggcaggagcgtctagagtttaaaattgtgtttctttacaatatttcattttttaaaatatatttttccatattaatctgtgaaaaaatatattaatgaaaaactgacgcaaaggaaatattttaaaataatattttttatttcagttatacaaatacttggctagatatagtttttattttgacatgttagaaggatagttttgaggtaaaagtaattctttattaaatatttttttcttccatttttgttttgttttgtatttttgagttggggtcttgctctgttgcgcaggctggaatgcagtggtatgatcatggctcactacaacctcttaccttctcagctcaagaagtccttcctcctcagcctcctgagtagctggtactacaggcatgtaccacgatgcccagctaatttttttttttttaatgtttttgtagagatgggggtgtcaactatgttggccaggcaggtcttgaacttctggcctcagctgatcctgtcaccaccacctcccaaagtattgggattacaggcatgagcgactgtgcctggccccttttcttccctttttaaaacctaatttgaatttcataatatctagacttacattaatataacacatatgcctaattctatcacttcttttttttttgagacggagttttgctcttgttgcccaggctggagtgcagtggcgtgatctcagctcacctcaccctccacctcccgggattctgctacctcagcctgccgagtagctgggactacaggcatgtgtcaccatgcccggctaatcttgtatttttagtagaggcggggtttctccatgttggtcaggctggtctcgaactccctacgtcaggtggtccgtctgcctcagcctcccaaagtgctgggattacaggtgtgagccgccgcacccggcctctatcagcttttttatgtttgcaggctttttgtttttgctttattccactaggtttcccagatttagaagaaatctttcattgtccacttcctctatttcctttagatattcttatttctattttttttttacatttttctcagtaactaaaactgtctgcacatagaaaagaacctgtctaagttgtcattgaacaaaccaaatgatgtttgtgatcatttacttcatataaatgtgacattgcgttaaacaattagattgttggctttcacattagctccaattttgagtttaaatggaagacatcaggaaaataaataccaaggaaaacagaactatctgactttatcagttattgcctcttttcccagattttttcttaatttatagctcttctttttttacttttaagataactatctctgggtttcagatgttgctgttgctaaaaaggcgctctcaagcatacactgcgtcagatgatattttttattataatgtagattatcaaaacttaagcatatacttaaaatgtttcataattatagctgactttgtttctacaaaggtgaaatactaatgttatatgtttctttttaattttcaagttatatagattccttgctgttcctcatctgtgcttatcagaataacaaagaactcttgtctaaaggcttatacagaggacatgatgaagaattgatatcacattatagaagagaatgtttgctagtaagttgaatgcatatagtatgatcttatcattttgtctgacattgggcaagttttccagactcatatataagtgattgactccataaactctgaggggataagaacatgatgatgtctataaactggttctagtcccttcagatggaaaagtacactcagtactttattcttttctctttatgaatcccaagtactataggtgataaatgagaaatgttcttaaaatagcatcagtttgtttacatttctgtatttagatttcgtcatcacactaccactcctttttttggtgggagaggaagggatgcatagataagccttaaaaaatgttttatgtaagtctataagaatatgcaggctggcgcagcagctcatgcctgtaatcctagcactttggaaggctgaggctggtggatcacaaagtcaggagatcgagaccatcctggccaacgtggtgaaaccccatctcgactaaaatacacaaacacaaaaattagctggatatggtggtgtgcgcctgtagtctcaactactcaggaggctgaggcaggggaatcgcatgaacctgggaagtggaggttgccttgagccaagatcgcgccactgcattccatcctggcaaccaggtgacagagcaagactctgtctcaaaaaaacaagaatatacatagaatgtattagagtaatttgtttaacttaaaaaattgaattttcaggtacaagaatagtatagctgactttaaacatacatagaaccaaaacctgatggttcctctgaaaccttcaaaaaatggtataatgtttctcatcattttttgtagtaacccagccacatttggttatttgttttacataggaattgaaatgaaacctcgtcaagattactttagtgttcctttcagattttttcacgttgtatatttacaaagtgtcaggttctgagggatacaaacatgagtaagatgtacttcctgtcctcagaaaactcagtctggtaggagacataattgtttgttctggaataagtgccattatgagaaatatgcacaatgatatgcctgaaatatttgggaagaaccttaagagacaaggtaaacctcgtctggatcttgatggataaatagaagttttattcatgatagagaagggagaatattccagtacacaacagaaaatcaagataaattcactgtggctatccaggttatgaggaagtggggtaaggtggaagtgatgaagctgacaatacttgtcgatgtcagatgatgaagaaacttagatgacattcaaatgagtttgcaccagtgtaagtttgattaggtttggcataatgaggtttgttttcagaaaataattctggtaataataatagcattctagaggatgaacaggaaagaagtagattgaagtcaagaaccttagaggggaaagtcaagggacggagagtgaggacctcaactcatgtagtacggtaggtatgatggtgaaggaaatgaaatcggcatgtcatagctgttgggtgagtgggaagaaggaaatggaagagtcaaagctgccaaacttactagtttttcgtttaatattagggagtctaataggaggaacaaggttggctttgaacatgttttatttaagagatttccaggacattctttgattcagtgaacttaacattaaacttgtcattaaattttatatatcatttaatgcatacttccaaaaattgtagtaaatacttgaagatttatctcattttattctcttaacccctatggttggaagataaaataccctattattaatataaagaaagtgaagctaacagatttagctaatctgttcacgattggtgtattagtccgttctcacactgctataaagatactacacaagactgggtaatttataaaggaaagaggtttaactgactcacagttccacatggttggggaggcctcaggaaacttaaaatgatggcggaaggtgaaggggaagcaaggaccttcatcacatggtggcaggagagagaagtgcaagcagaggaaatgccagatgcttatgaaaccatcagatctcatgagactcactccctgtcacaagaacagcactggggaaactgtccctatgatctgatcacctcccaccaggtctcttcctcaacacctgggggttacaattcaagataagatttgggtggagacacaaagcctaaccatatcaattgggtaattgattcatggccaagttggacttaatagcacaaccatctttccaaaatcaaaataaattgcataagaattatgtggtgtaaatctaaatatataactttttttatttgaaattcagcttaaaagtcatgtttatcatgctgtaaacataagattttaaataagaacccttaaatattataggtcttatacctgtatttatctcttatgtttcttattgcatggatttctctgttctactagatcagtgatcagcacactatggcttgtgctccacctaccacttgtttttatagataagttttattgaaacatagccatgcacattcatttatatattgggtattattgtctttgtactacaatggcagagttgaatagttgcaacagaaacttcatggccttcaaagcctataatagtcctcgtctggcccttcacagaaaaagtttgccaatccttgtaccaaattgtaagctccatgagagttttctgtattaatcacttgagtgcccctgcatctgcagaaatttctggcacgtggtgttgactctgtaggaagtttttgaagggaaaagtgaattgattacctttatatttctgtatcaaggaatacaatagtatatattcagttgccattaatggagatgagtttttcaaaaattaatatggattctgaatttctttatttttaaaactattttgagtgcttatacaattttataatttggggaagttaatctctagagaagaaaaaatggcccctgtgttgatgatcggcataagccaaacatgactgaaaaacacaataatgttttctccaccgctgttgcttttgtttctgttgttgccatatgcatagctttttctaaagagagattttcagttctagataggttgagattgttttctctaaataccgtttgttctaatactgtttgtgaacatatttatgttgtcttccttattaatacttacagatccttaatttaaaaaggaaacaaaaacctattcttttttttttcctgcattgcattaagaaattaaatgagcaagccgcagaactcttcgaatctggagaggatcgagaagtaaacaatggtttgattatcatgaatgagtttattgtcccatttttgccattattactggtggatgaaatggaagaaaaggatatactagctgtagaagatatgagaaatcgatggtgttcctaccttggtcaagaaatggaacgtaagtttaaacaatggtagtaggcacctgagatgtccggattaaatgcagttagaattagatgttatttattcttgccattttttatattaaatacaatattaagtattaatattttcacattcacatgattactctttttccatattgatgaactaagctgtgtgcattgcagttgccatttatgtttttgtctccccaaaatggcaattatcttacctattagagtaagttaatattagtaaatcatgttgacaatgatcgtgtaataatttctatctttagttagatttaattgtttgtatttgcagcacacctccaagaaaagctgacagattttttgccaaaactgcttgattgttctatggagattaaaagtttccatgagccaccgaagttaccttcatattccacgcatgaactctgtgagcgatttgcccgaatcatgttgtccctcagtcgaactcctgctgatggaagataaactgcacactttccctgaacacactgtataaactctttttagttcttaacccttgccttcctgtcacagggtttgcttgttgctgctatagtttttaacttttttttattttaataactgcaaaagacaaaatgactatacagactttagtcagactgcagacaataaagctgaaaatcgcatggcgctcagacattttaaccggaactgatgtataatcacaaatctaattgattttattatggcaaaactatgcttttgccaccttcctgttgcagtattactttgcttttatcttttctttctcaacagctttccattcagtctggatccttccatgactacagccatttaagtgttcagcactgtgtacgatacataatatttggtagcttgtaaatgaaataaagaataaagttttatttatggctacctatgtgtttgtaagcaggtatattgtatattagtgtattagtaatactagataaatgaattttgtctggggattaagattggatagttaatagattaatacaatcttttaattctgctctaatgctagcaaattggaaaatgtttaagtctttgacacttaaatttatctatatttttaacaaagttcttgaacttagtatggcaccggaacctgttttgaattcagtcaggtttttactcaagtaagtggttgattttttttaagtcaaactacactgaaacttttatccttttcttagattaatcttactttttaaatgtatttacaatatacagcaaggtgattatttcaagagaatcccaaagtacttgaataagggctattgtaaaatttaaaagaaatatttatatatacacatatatacacatacacacatgtatatatatattcttcataatggaggacaatgttttgcaatatataaatcattctatttttgtaaattgtatatcactttaattgaaaatgttctctactaattaatactgtgaaacaaaattgatgttgtttaactagaagttatgagtatcttaactgcctttattccttttcaaaaaggaaaaagctgtagaacattttgtagatgaaactactgtttaagattaatgaattaatattgtgaatgaaaatcaaaatccatactttaaaggtaatcatgttactaacaacctatttttgaattcataaaaatttctttataaatgatgttttgtgaacatagtaaaatagaccattatactatgtgtatgtttgatacagcgtcgccaaaactagtgttctttattagtgcctctcacaaaagatcctggatggaggagtaagatgaaatattatgctattatatgatgctgtttgtaaaggtattaatgtactagtaaggtgttaatgacaaggaattagtactattcctgttgtaaagttagattttgcatattgtatctatcaaaatatgtttgggtttagattttaagttgtctactgagcagatttctgcattggttttccagtcctgttaaaagtttagaaacttcatatgtgtcatcacagcttttgtaaagaaagtatccttaatattttatgacattctaccacagtggtaaagttgtttgtgtttgtgtataattgactgctgagatacaaagtgcccaaacactatatggaaattattccttcaaagtcacatccagagaatcatgtcactcttgtgctgaaggtaagtattataattgtatttactatgtacttaaaaaccagattatttattcctagtaatgaatttgaaataacttatttaaagaaaagtgacctttttcaagacctacagaaacaacttattttaatattggtttttaatctaattgtaaggtttagatcattgaaatttctttttttttttttttttaaatttccaacttttaagttcaggggtccatgtgcaggacatgcaggtttcttacagaggtacatgtgtgtcatggtggtttgctgcacaaatcatcccatcacccaggtattaaccccagcatccactagctattctaactgatcctcttcctcctcccagcccccaccctctgccagacaccagtgtgtgttgttccttccaccattgagtccaatatgttcttatcgtttagctcccgcttatgagaacatgcagtagttggttttctgttcctatgttagtttgttcaggataatgatctccagcttcatctgtgtccctgcaaaggacatgatcccattcctttttatgactgcatagtattccatggcgtatatgtacgttttctttatccagtctatcactgactggcatttaggttagattccatgcctttgctattgtgaatagtgctgcagtgaacatacacgtgcatgtttttataagagaacaatttgcattcctttgagcatatatccagttacgggtttgctggctcaaatggtatttctctctttaggtctttgaggaaccatcacagtctttcacaatggttgaactaatttacacttccaccaacagtgtaaaagtgttcctttttctccataacctcgctaccatctgttgtttttatgacttttaataatagccattctgactggtgtgaggtggtgtctcattgtggttttgatttgcatttctctaatgatcagtgatactgagctttttttcatatacttgttggcctcatgtatgtcttcttttgagaagtgtctgttcatgtcgtttgcccactttttaatgggttttcttttttcttgtcaatatcataagttctttatagatgctgcatatgagacctttgtcatatgcacagattgtaaaaattgtctcccattctgtaggttgtcttttttactctgttgttagttttgccatgcagaagttctttagtttaatcagatcccgtgtgtcagtttttgcttttgttgcaattgcttttgacacttcgtcatgcaatctttgcccattcctatgtcctgaatggtattgcctaggttttcttctagcgtttttatagttttgagttttaaatttaagtctttaatccatcttgagttgatttttgtatatggtgtaaggaaggtgtccagtttcagttttctgcatatggctagtcagttctcctagcaccatttattaaataagaaatatttttcccattatttgtttttgtcaggtttgtagaagatcagatggctataggtaggtgtgtggtcttatttccgagttctctattctgttccattggtctctatgtgtctgttcttgtaacagcaccatgctgttttggttactgttgccttgtactgtagtttgaatttgggtagtgtgatgcctccagctttgttcattttgcttaggattgccttggctactcaggtttggttttttgtttcgttttgttttgtttggttccatatgaattttaaaagttttttctaattctgtgaataatgttattggtagtttaatgggaatagcactgaatctataaattgctttgggcagtatggatatttctacaatattgattcttcctatccatgagcatgaattttattttccatttgtttgtgtcctctctgatttccttgagcagtggtttatagttcttgaagagctccttcacgtcccttattagctgtattcctaggtattgtattctttttgtggcagttgcgaatgggagttcacttgtgatttgactcttggcttgcctgtttttggtgtatgggaatgctagcacttagtgcacattgattttgtatcctgagattttgttgaagttgcttatcagcttaagaagcttttgggctgagatgggattttctagatacaggatcatgtcatctgcagacaaagatagtttgatttccgtcttcctatttgaatacctttatttatttctcttgcctgattgctcttgtcagagcttccaatactatggggaataagagtggtgagagagacagccttgtcttttacaggttttcaagggaagtgctttcagcttttgcccattcaatgtgatgctggctgagggtttgtcataggtggcttttattattttgcagtatgttcatttaatacctagtttattgagaatttttaacatgaagtgatattgaattttatcagaggccttttccacatctattgaggtaatcatgtggttttcgtctgtagttctgtttatgcaatgaatctcatttattgatttttgtatgttgaaccaaccttgtatcccaggaatgaagcctacttgatcgtggtggataagctttttgatgtgctactgtattcagtttgccagtattttgtttaggatttttgcatcagtgttcatcagggatattggcctgaagtttttgttgttgttgttgacgttgtatgtctgctaggttttggtatcaggctgatgctgccctcatagaatgagttagggaggagtccctccttttcaatcttttgaaatcgtttcaggagcagtgatagcaactgacccttctttgtacctctggtggaattcatctgggaatctgcctggtcttggactttccttggttggtaggctgttactactgccttagtttcagaactcattattggtctgttcagggattcaatttcttcctgtttcagccttgagagggtgtatatgtccaggaatgtatgatttttttctagattttctaatttatgtgaatagaggtgttcataatattatctgacttgtctttctatggggttagtggtaagagcccacttatttctgattgtgtttatttgaatcttctctcttttcttcattagtctagtggtctcctagtggctcacgcctgtaatcccagcactttgggaggccaaggcgggtagatcacgaggtcaggagattgagatcatcctggctaacacagtgaagccctgtctctactaaaaatacaaaaaaaaaaaaaaaaaaattagccgggcatggtggcgggtgcctgtaatcccagctactcgggaggctgaggcgggagaacggcatgaactcgggaggcagagcttgcagtgagctgggatcgtgccactgcactccagtctgggtgacagagcgagactctgtctcaaaaaaaaaaaaaaattagctcctggattgtgtgattttgatttttttttgaagggcttttttttgggggggtctctatctttagttcagctctgatattggttatttcttgttttctgctaagctttggggtttgtttgcccttggttttctagttactttagttgggatattaggttgttgagatctttccagctttttgatattgtcatttagtgctataaatttccctcttaacactgctttagctgtgtcccagagatgctggtatgttgtatttgaaatttctttatataatttaccatgttaaatataacttatagctaataacttcggaatttgaacctcatagaactgtagtccatagcagatttcatttgatttaaatgactcttattttggttactatgttattccttcctaccccaaaaaagttacgttttgaaataattcagggtagaattcatatagatagaacttcagacatctcaggagaccagtacgcatgaatgaacatgtagggacccctctaatacgtttcacatccattatgatacaacaatgaccatacactttagtagttctcagtgtgtgttctccagatcagtagacagcttcagcagcttgggaacatgttagaattgaaaatttttgagtcccacctcagagctgccagttcagaaactcttcacgtaacctgtgttacaacaagtccttcagataattttgatgtttactagtttcagagccactgcactaaatgaaactattggtagcatttgtgcactgtaaattgatgctgtttaattttcattcacttgtgctctgttggaagcttttttgtgtttccttcacttgggatttcaaggaagtatctaatttttttttttttttttttgctcaattacatgtaattgagaataagataggtatctgattctccaaaagttcagcatctttattttatgatttaaacttgtcgagttatgcctctgggtcctgtcattctcccagcgaataaaaatgtggatgcttggggaagtggaggtggatggtaaatgggaatactcttgtttgaatttttaaaaatttacattgtaaataacattaaataccatttgttgtgcccatgataacttcatccaaaatatatatattagtctgctaagatatgccataacaaaataacacaggcttggtgccttaaacaacagaaatttttcttctggttctggaagctggaagtctaagatcaagctgttggtggatttgatttcccctaaggcctctctccttggcctgcagaccaccaccttctctctgtgtcctcacctagccttttctctgtgtcctcacctagccttttctgtgtgctgcatccctggcctctcttccagttcttataaggaccccagtcacattggatttgagccccatccttatgaactcacttaaccttaattatctctttaagggccctgtctccaaacacagtcatgttagggggttagggcttcaatttatgaatctgggggacaatttagtaaaaaaaatagtatgtgacagcccagtttatatacctgctttccagaaacaagaatatggttgttaatgtcttctctttagcctcaagatacagtgcaaatatctgtagttccgttcttacgtaagctttattttactttttctaaaaactatattgaaagtatagcaatccgagttagaaattgcttataatgcattcatctaatcagctcagtgttcttactgaacaaacttttatttccatgtttactcatgtttatttcatcagtttcacctgacattataccatgaatatatttctgttttgctagtgtttttattcttactgatcacatgtccctttttcgtcttccataccactcccagcctagagttaatgaccactaaccaccgtagccacatacttttccatgtttggataaccttatgcagcatatacacctaaagggtggtggtttttttagggggtggtggtggaaggggggagacggtcattgtttttacaaaaattaaatttcatctattttacacatcctttcccctgtcttccccttgtactttccaaccttcagtttcttctttttctaattagctttgtaggagtgacttaaaatataataaagtgaaataacatagcagtgataataatagaataaaaataaacgaaacgtgattggagaaactgcacacatgcacaccaagatttcagatattcttattccttccatgtacagttctcagtgggtatttcagaccttcactcccatcctcagcctctcctattcagtgccagcttctgtaacgctggatgatcttttctttgcctaacgaagaaaactggagatgttaggtatgatcctcctttcaacttttgtgcctcctatctaaattagttgttaaccagcttgtaatgaagggataaacattgataacccaatattatttagaaaatagaaatagaatcagaatatactatgaaatgagcttacaaatttcaacaagtgtccactattttgggagtgtgtttgctcttctccagcagtaatccagaaagctcactttttcccccgagactatctcatacaacatgtttgccctgtagcaaacagctccttattttttcagtaatgtagagctagaccagtattcttctgttgtttttattttgtggagtttttgtgtgtatttttagttttttgaaacagggtctcgctctgtttcccaggctggagtgcagtggtgcagtctcctctcattgcaacctccaactctctggctcaaacaatcctcccacttcagcctctgaagtagctgggactatatgtgcaagccactgtgcttggctaattttttaattttttgtagagatgaggtctcactatgttgtccaggctagtctcaaacttctggactcaagtgatcctgccacctccgcctcccatacccctgcgattacaggtgcaagctactgcacctgacctagacccatattcctaacctagttcgtcaaaagcatatgaggaacttttttttctttaaagtgtccagatgttatctctcatgtgtattacagggcttcaaatgtgagaattggagtttagatagttgtttttccaattttaatttaagatttgcctgtggccctactatgtgattgagcctagctaaagtagtgtggaggaatttgctttttacagtactgtatgtcacatgaaagggcaggggtcttcagattgctgatgttccctcagccatagaccatgcccacttttgacgtgctctagccaaagctgcatgaaaatatttttcagtccctactggatttttctcttatgaatggttaacagtgcaggttctggaaccaaactacctggattcagattctggctctgccgtttattcgctgtgtgttgaccttgaatgagtgatttaacttttccgtgcctcagattcttcatctataaaatgggcattatgacataacacaccttagaggattttttaaaagattaaatgggtttccagatataaaacgtttagaaactgtctgccacattaagtattcaataattgtgagccctttttatagtttgtcagtattgtttactcctgttctggttttgaggatctttagcttccatcctctacctgcattcctagtgtttttttttttctccctacttcttaaagttgtgctcaaggtttggtacttggccccttcctcatgcttttcactttttctggttgtgtctgttagtttgtcttcttattctgcctccatgaatcacaggtcattgttttctaatcatacccatgtgagttctaaaccaatacatatttgcagttgtcttttcatcacatatacctggatgtttcgcagacactttcgacttggcacatctgaattcatcactttttcccaaatctgattgtctcatactcccttgatgaaatgatgtaataatcccaaaatgaattattctcaattctacttttacctcccattgattaccaagtgtcagcatgtcagattttttaatactccttagtactatggctgatgaggtccgtcatctcttagtttgactgttagatttgtccctgagtagcactgtctttgattttgcccctgaaattcatcttcacactgttgacagaataatcttttaaagtggtttgttttacatgtctgtcttccactgctggactgagctcttaacaggagattgtatctcttgtttttgtaatcctagcacctgttaaaataactagcaacttagaggtgcagtcttgcaggttttctgaccctccagtcaccctagacctgcactgatacagttttcgttagccatttaaatttaaataaaattgaacattctgttaattagtaatactagctatatttcaaatgctcatagccacatgttactgttgactactatattggacaacattttagaacatttcgattatcataggaagtttcattggacagagctgccccagcagacctttgctgatgtggatgtctttctgtattaacatccttttaacattcagacacctcccaaatgctaaccttaatagattggccttcagcatttatgtctctctatcttgatcctgcaattgatgactttactatgtctgctctgcagagagcaccactaccagcatgtgtccaatcaggaaagccgacactacatatttcaacagaggagatgtgagtacagaggcattagagagtaacccggggatcacaactgtaggatgcagctactagtcctaagggtaagaaaacaaatgggaaaaaattggggctgccagagccttaaagctccaaaaagggtcatcatggcattagtgctcagacccctgaggaggcttaccacctacctgctcatggtaattctgaggggtaaagtaacgacagttctagaagtttcgaagtagttgaaggctggaatttgctgccgttattacaaagctgataggactagccatcagagatgaactagatcttttttcatcttcctgccaacttccctgtagtacttcctactggcagaacctaataagcagcagtcagaggggtcagagaagtgtagtttgcagagtcccggcctcagcacacagagcagaggacagaagggtggaattggagctgagaaacaatagatgaagaaccagcacactggtttccttcaaagactcatttttatctaaaggtattagtccctaaaacgccagatactcaggaatttgtagagaaattctgggccctcaagaataagtgtactagttcgaattgaaatcttgttactcttttctgttaaacgagactgtaatgctgctatatagtgcttaacttttaaaattgacagtggatgaatctgcatattatagtcaggtgttcatgtccatccattcatttattgagtgcctaccacatgccacacaatctatcaggtggtatgtatataaaataaaacttagataataagacaaaagtaataattcacccaaattcatctataaatccagacttagggactgttgacatttttgtgttcgtgcctgtggacatctttctgtgcatatgcatgtacacacatcacaatatcataaaaagtttataaatgcagatgtttccaagaaagtgtgtattcatctacctctctcctgctgtatagtatttgattataaggagaatgctccattactatttacctgtggacatagagcataggctgctacatatgtctctatatactttatgcactttgtctttccactaaaatttctcaaggtataatttctgtctgggtcactgaatatgtagatttaaaattttgagctacatttttcaaactgcccttcaccaaagatgttacagtttacactgccaccaatagtacatgagactgttctttcatacattcaataacagaatattattgacctttaatttgtttgatagccaaaagtgtgttcttcgcatttcaaaatttttagtgagagcatattccaatatgttaattgactatttgtatttcttgtatagttaactacctgtttacatcctttacactttttcttttgggtgtttatgtctgtaacttggcagtagctcatattaggaatcattattatacacgttgcaaatatttttacaattagtttatttattattgcattataaccatgcttacgtagtggtgctctactatttctgccttaggtataatgtttagaattttctctggtcagggttataaaaatactcatgtttctcctgatatttttatgatttcatttttagatcagtctttaatgcagttgacagttacattaaagtagtgaaatagtcaacattttctgtcagtattatctggttgtcataataccatttataaaataattcctgctcttcctcattgatctaaaatgtaacttccactagataatcatatttatgtttgatatttacaaatactattcagttctattttgtctgttcagctactttcactgatttaattattgttgcttcttgtttgactatatatttaaaatatttgttttataactaatacaaggtttcatacctaataggtcaagtattacttcccaacacatacacccttatctctttcataattccatactcttttacagataaactgtagaattatttaatcttccttcaaatacaggttctattggtattctgattataatacaggatacatagatacatacgacattgcatgggtcacataaattgtggcaccttttcaatattaatattcttattcataaagaatattgtttgtcctattaggttcatatgcccctcagtaaagtttttagattatttttctttagtcaggtatcttaatgtgttttaatgttcttgtatttatgaatgtgctccttttttctccccctttacaaaaatgttttctaattgaatattttcattttttaaatctcagaacctcttcacacaaattagtaagggcctcagagaacttttatgttggcaggtatgtctgctaatatttaccacttcagaaattaaaaatgtaattgaaaagtgacatgtctatgtaacatttatgttagcataaatattttaagtgaaaaatggctaaattttttgcctagcccttcttttggaggcttgtagggaaataaaatactgattatatctgtccctgtactcacacttcaagaataacacatagaattaacttggaatttggactagcaaagactgaattattgatcatcttaaaaatggatggaaatcatttttcatggtagtcgtatgatttcttggcaattagctaatttctcaggaaaattaagggtgacagtgtggaaggtaggcatctccgtcagtgtggaaataccaccctctaagacaactgctttatgcgtgggttgtacttcccttgccgcatagtttgaaaatgtctccaggaagaaagtttaccgggtgtgctttactgctctcaagtattgcagccttgtgctatccattgtccagacactgaaaagaattgcttcatatatttttacccaactttgattattaatggcaggaaagttattcagataccaactgttccatgatggttaaatctcagaaatctataattctcatagaagataccataggagagtatctttaaatcttggaataacaatgggtctcttcatacacacacacacacacacacacacacacacacacacacacacacacaaattaaacatggtggaaatttttgacaaatttaaccacattaaatattctgtccattaagattccccaaagatggtggaaagatggcaggttagtgggagaagatatttgcagcatgcaaggcaagatgacaatgcactaataacaaaatttcataaaacaatggacttggggcttgggaaaaataattatgacatgctttctgaagtgtccccagatagtttcataaaaaatggagcaaataggctaaagaaaaacccatagacatcatgttcaaaagaactgatgacaaggcatgttcataacccataaaatacaagtggatgcagctaaataactgcaatacttttgaaagagtttggcaggtttcgaagatgtgaggagctacaaagcagattaaaaaaaaaaaaaaacctaccacacatacatttaaatcaatacaaacatgcctgataattaaaacaaaaaaggcttgaacaagcactttaccaaaaaaaaaaaaaaaaaaaaaaacaacgaaaaactaatcaacgtggaatggtgttcagtcttattagcagccaggaaaatgcaagttaaggccacaaggagataacaccaaacacatgtaaaactgaaaaaaaacatttagccatcctcactagcaaatgttggtgaagatgtatctgtagtagtgggaacactcattatactggtgtgtgtgtaattcagtccaaccactttggattactttaaaaatctgaagttatgagtatattcagcaattcctaagtattttttctaaagatatctagatacatgcgtatcattttacatgtacaaaatgttcctggaagcgtagtttgtattagcaaaaactggaaacaaatatccatcaacagtaagcacatattgcactatattcatataatggaatactgtactgcaatagagagcaaaccacggtgcatgtatcaacaggagtgaaatagtattgaatgaaataagacaaaagcacatatagtgtaatttatttaatgttccaaaaaaccttaggtaaacccaaaacatacaagaatgcactcatgtatagtaaaacgaaaaagacagaaggattgccatgtaagttagattaatcattacttgtaggagggaggaaagatgtatggtttgaaagggacatttgggagtggctatacttgcttctaatattcgattttgtaatctgtaagtttgcaattgaagttatacacttgggatttagagtaggattgtcccttggagatataaagttaaatacaaatataaatcatcagctctgagatgcatttatagccaaggaaattcatgataccatgtaatgaaatgataacgaagagaagggcctacgacgagttctgaggagcactgaaaggttctatgttggagggaaaatctgcaaaggaaatagagacgaatattgaatgaagtaggaaagtctgtgtctctcaggagaattcttccaagcataagaagtaggcacctgtgtgaagtgcttcagagtaaaatgaggatagatgagtaggcaatcttgacaagggttatttccgaatgatggggaccaaggctcgtcagagtggcttcaagagttcagtggggacttcttttcccagaagcatgcatcatacagctggaaaacactcccgttaacaagacacaggattgaaaaaagtattaatattgaaacagttttcatgcattcctcagactaagaaggaaggaaacaatattcttagtggccaagaatcaaggaaacctgaaatcattttgaccaactgatctaaaaggaggaataaattacttttccagtctccccataggaaattttacaaaattattaatatgtgaaggggtgtggcccaaaatgaataaaattacagagactactggatttaatgatatttattggtatttgtcatatttttgtaattttaattttcatcctaaataactttcttcacaattttacattttaaaatttaacaacttgtcctcccagtatagattggatcgttaggccatgaaacataattctggtgagtaagcaggggaaaaaaaaaaaaagagcctagggcccatgcaaaaggcaaaattatcaggaaaaagggagaaaactttctcccccaaaaaagacaagaaaacaacttgcgtttttttataatttactctagatgaagggagcaattcatacaagctgagtatttggttatgtgtgtttgaggctagagttgacattgcatagattatctgaaacatctcaaaatgagtactttcaaatggctccaggtttgtagtgatcccaggaacctggcagtaacaaaattaaatcctttgtgagtttaattgttaagtgttggctttgaggaacataatattttattttatttgatatatataagctgtgaccaaaaggtaaatataaacatttgtagaaatttaccaaaaaaaaaaaaaattatttcagatgtggatggtgtaaaagaattgacagaaatagcatgataaatataatcatgtttatcaaattaatcatcccaaaaatggggcctaaattatctttagagcctctctctaatttcatggtgagttggtttgggagaggaatctcccagatccccgttcaagggagcgtttcctgctggcacatccttcagggtctacctcagctgcagagggtcactagagggcttacttttcctgcggtctcccacatcttgggcccatggatgcatgaataagtggtcaagccactttggcccaatgcagggccacgtatgccctagagtccttcactgggttgaccatgccattgatcatcatagttgtacttctctctctacccaatcctaactttcctaattctgtccacagatgctgattgatctaatctcggcttgtggaggacgaacctcttgcatacacttacccaaataatttactgtgattaggtttcttaggtataccgatgcaaaaacagaacgaaattcatcttgcaagcaactgtctctcattataggttagtaaatgagtgttttgtttaataaacatatctattaattttattaatccaaactagttcacctaatagtactcaaaatagcaaagataaatggttaagctagaggcttccctaacatgaaaattgactaataattttgttaaatgtctctatgctgtcaccagtgtgtatatattggccattcttttgatcactttattgatatattttgcttgcagttgaaaaaaagatagttatacttagataacttgattgctgtcttctaaattcccagtaggtggtgtcataatactgtatttagggatttttttttatttatttaataaagtggaaaaagaaagtgcaaatgtgtttacttaagtatatgtacttgcattttaaaagtgttttggttttattatgagatgacactgttataaacaacttaattccttatatgtttcttcaattcacatttttactagaaaatatgtactgacagttttattcttttattctctagaatgatacaaaactacctagtcaaaagaacaagatggccacaatgtttacagaaatattttctcatgatctttttttactctcatatcttagacatatgaaaaaaaaaaaaccgtacttgtcttggaagtcaaaccaggatctgtcattataattattgtaaccttatttacactcaaaatattttctatttttggctacacttttcaaaaactctctacatcataaataattcacctttttggaattttggctatttctagttgagttgtaagtagttctaatttttctaccttacattttagtaatctttatatgtttactttcacaatacaacatgtgctcagatagttacaactcagatagtagtgtggcctctatgcaaggatgactctcaacattccatgaaacattccatgtttttaatgtcttcccagctgggtcataagccttttgagtgtgtggcccgcaaattagtaggttcttttgttttttgttttgtaatcaccgaaatgcctatatatagtagtgtttggtaaatacatattgaataaatgtgatgctatgtaagtttaaataattctccttgactctccctgtactccagagattaggtgacttcagtgtgaaatctattgttttgctaatttaatgcttgtgatacttcagtagtcaagaatctgaagatctgtactctccacgggttgatttttaatggaatgatgtaaattgttttgagtagaaagtgaaactaggctgaacttggctgatgcccacctatgttggaaatatttaaaccagccctagccagagagaaattgcccatctggtggtcagaacttgagttctggcaagactcgctgccacaagctaaagtgctctggtgccctaaattaacttgaaaggcagtctggtctaggtgaatccaggtgctgaactggcctcagaaccactggacttggcggtggaggggggcatgtaacttactgagacaccagccaggatggctaagggagagcttgtgccaccaccccccaaaccccaggcagcacagcttgtgactccaaaaaccccttccttccacttgaggagaagggtgtggggctgtagtaaggagagctttctcctgcatcttggataccagctcagccacaataggatagggcactagttagagacatgaaccctcatttccaggccctagctcctgggtgacatttccagacacagatcagaagggagtctgttgccttgaagggaagagcccagtcttggcaggattcatcacctactaactgaagaatgcttgggccctgaataaccagcagtaatacccacgtagtatgctgtgggccttgggtgagactctgagacttggtggcttcaggtaccagcttggccacaagggagtagtgcaccaaatgggctcttggagatctctgatttaggccttggcttttggacagaatgtttggacctgcccgtgaaaagatagggaagagtgagaagaactgcatctcattgtttgagtgccagctcagctgcagtaaaatagaattccaggtagatgtctcagatttttgactccagtccctggcttctggatggcacctctggacatgcccgaggcctagggagctcactgccctaaagggaaggacacatgcctggctggctttgccatcacctgatttgtagagccccagggacttgagtgaacataggcagtagccaggtcgtggttacagtggaccttgcatgagacacagtgctgtgctgccttcaggtctaacccagggcagtcccaatagtagtggcgacaggggtgcttgtgtcacctcacctccaggtggctcagaatggagaaagactctttgtgagaaaataagaggacaagagtcgctgtctagtaattcagagaattctaccagatcttttccaagaccaccaaagtgctacatctacaagtctgcaagaaccacagcattactgggcttggggtgccccctaatgcagatatgaattaggtcacaacacccaagtccttttgaatgtctggaaagccttcacaagaaaaatgggtaaacaacaagcccagactatgaagactataataaatacctaactcttcaatgctcagacacagatgagcatgcataaccgtaaagaccgtccaggaaaacaaccttgccagatgaactaaatcaggcaccagggatcaattctggagaaacagatatgtgaccttttggacagataattcaaaatagctgtgttgaggaagcttaaagaaattcaagatcacacagagaaggaattcagaattctatcaaattcaacagagactgaaataattaaaaggaatcaagcagaaatactggagttgagaaatacaattggcatactgaagaatgcattagtcttgtaatagcgaattgattaagcagaagaaagtgagcttgaagagaagctatttgaaaatacacagaggaagcaaaagaaaaaagaaaaacaacgaagcacacctacaggatctagaaatagccccaaaagggcaaatctaagagttattggccttaaagaggtgatagagaaagagataagggtagaaagtttattcaaagggatagtagagagcttttcaaacctagaggaatatatcaatatccaagtacaagaaagttatagaaaatcaagctgatttaacccgaagaagactacttcaaggaatttaataaatcaaacttcgaaagatcagggaaaaagaaagcattctaaaagcagcaagagaaaagaaataaataacatttaaagaagcttcagtacatctgccagcagacttttcaggagacagtagcatgatatttgtaaagtgctgaaggaaaaattctcttaccttagagtaatacatccagcaaaaatatcctgtaaacatgcaggagaaataaagactttcacagacaaacaaaagctgagggatttcattcacactaggcctatcctacaagaaatgctaaagggagaacttcagaaagaaaaagacattaatgagcaacaagaaatcatgtgaaagtataaaattcactggtaatagcaagtacacagaaaaacacagaatattataacactgtaactgtggtgtgtaaaccactcttaagtagaaagaccaaaagatgaatcaatcaaaaataataactacaacaatttccaaaacatagtacaataagatataattagaaacaacaaaaaatttaaaagtggggagacgaaattcagttgtagagtttttattttcctttttcctgtttgtttatgttgttacataacataaacttaacagtgttaagttgttaccagcttaagataataggttataaaatagtattaatatttgcaagcttcacggttatctcaaatcaaaaaacataatggatacacacgcataaaaaaacaagaaattaaattatactactagagaaaatcaccttcactaaaaggaagacaggaaggaagaaaaggaagggaagaccacaaaacaaccagaaaacaaataacagcatggaaggagtaagtccttacttatcaataataacattgaatataaataaagtttccaatcaaaagtggctaaatgtatttttttaaaaaaagattccatgatccattgcctacaagaaacttcatctctaaagatacacatatactgaaaataaaagaatggaaaaagatattccatgacaatgcaaaccaaaaaagagcaggagtcactatacttctctcagacaattagatttcaagacaaaagcgataaggagagacaaagattgtcactgtataatgaaaaacgggtcaattcagcaagaggatatcacaattttaaatatatatgtacctaatgctggagcacccagatacattaagcgagtagaggtaaagagagcgatagactccaatacagtaatagctggagacttaccaacactccactctcaatattgaacagagaatccaaacagaaaatcagcaaaaatgcatcagatttaatttgtactgtaggccaaatggacctaatagatatttacagaatattttatccaatggctgcagaatacacattcttctctttggcacatatattattctcaaggatagaccataggttaggtcacaaaacaaatcttttttaaaaaatttgtattttgggtttggaggtacatgtgaagatttgttacatcgataaacatgtgtcatgggggttgtacatattattacatcacccaggtattaagctcaggatccaatatttctcttttctgttcctctccctccttccaccctcccctctcaagtataccccagagtctattgttttcttctttgtgttcataaattcttacaatttagacaaaacaagtctgaaagcattaaaaaaagaaataacatcaagcatcttctctgaccatgatgggatagaactagaaattaataacaacagaaattttggaaactacacaaatacatggaaattaagcaatatgcttctgaatgaacagtgggtcaatgaaaaaaattaagaaggaaattgaagaaattaagaaggaagcatatgtgcctacatcgaaaaagaagaaaaacttgaaataaacaacttaacgatccatcttgaagaactagaaaagcaacagcaaaccaaacccaaaatgagtagaagaaaaataataaagatcagagcagaaataaatttgaaattaaaaaaacacaaaggatcaattaaacaaaaaagtttttaaaaaggtcaacaaaattggcaaacctttagctagactaagaataaaagattcaaataaataaaatcagagatatacaaggagacattacaactgatagcacagaaatttaaaggatcattagtggctactatgagtaacttatgccaataaattggaaaacataaaataaatggacaaattcctagacacatacaacctaccaagattgaaccatgagaaaatccaaaatctaaagagaccaataacaagtaaaaacaaaagccataataaaaagtctcccagcaaagaaaagcctgggattcagtggcttccctgctgaatccttcaaaacatttaaagaacgatcaatcctactcaagctattccaaaaaaatacaggaggagggaatacttccaaacttattctacaaggtcagtaataaccctgatatcaaaaccagacaataacatcaaaaaagacaactataggccaatatcactgatgaatattgatgcaaaaatcctcaataaaatactagcaaaccaaatttaacaacatattatagataattcattatgtccaggttggatttatccaagggatgcaagaatggctcaacacatgcaaataaattaatgtgatacatcatatcaacagaatagaaaacaaaaactatatggtcatttcaactgatgtggaaaaagcatttgataaacttcaacatctcttcatgatttaaaaaaactctcaaacaactggctatagaaggaacatacctcaacataataaaaggcatatatgacagactcatagctcttatcatattgaatggggtgaaactgaaaaacctgtcctctaagattgggaacaagatgaggatgcccactttcaccactgttattacacatagtactggaagtcctagctagaacaatcagacaagggaatgaaataaaggacatcaaaattggaaaggaagaagtcaaactattcttgtttgaaaataatatgatcttatatttaggaaatcctgaagactccaccaaaaaactattagaactgataaattcagtaaaattgcaggatacaaaatcaccatagaaaaatcagtggcttttctatatgccagcagcaaacaatctgaaaaaaaattcaagaaaataatctcatttacaatagctacaaataaaataaaatacctgggaattaaccaaagtagtgaaagatttctacaatgaaaactataaaacattatgcaagaaattgaagaggatgcaaaaaaatggaaagatacttcatgttgatggattggaagaatcaatattgttaaatgttcatattacccaaaggaatctacagacttaaagcaatccctatcaaaataccaatgatgttcttcacagaaatagaagaaaaaaatcatgatatttatatggagccacaaaagacccagaatagcccaagctatcctgagcaaaaagaacaaaactggaggaatcacattacctgacttaaattatgttatggagctatagtaaccaaacagcatggaactggcataaaaacagacacataaaccaatggaacataagagagaacccagagataaatctatacatctacagtgaactcatttttgataaaggtgctaagaacattcattggggaaagtctcttcaataaatggtgctgaaaaaactgggtatctatatgaagaagaatgaaactagacctctatctgtcaccatgtataaaaatcaaaatggattaaagacttaaatctaagatctcaaactatgtaatttctataagaaaacatgaggaaaactctccaaaacattggtttgggcaaaacttcttgagaaataccccataagcacaggcaatcaaagcaaaaatatacaaatacaatcaggtcaagttaaaaatcttctgcacagcaaaagatgcaatcaacaaagtgaagagacagcctacagaatgtaagaaaatacttgcaaactacccttctgaaaagggattaatagccagaatccataagaagttcaaataactctttaggaaaaaaagtctaaaaatccaatcaaaaaatgggcaaaagatttgaatagacgtcactcaaaagaagacatggaaataataaatataaaaatgtgctcaacatcatcaatcatcagctaaagtgcaactcaaaactacaatgagagatgtcttctcacctcagttaaaatggcttgtatcaaaaaatcagacaataacaaaagttgacgaggatgtggagaaaagggaaacctgtacacgataggaatgtaaattagtactactatggaaaacagtttggagattcctcaaacaactaaaaatagagctaccatacaatgcagcaatcccacataacccaaaataaaagaaatcatatattgaagagttatctgcactctcatatttatggcagtattattcacaatagccaagatttggaatccacctaaatgttcatcaacagatgaatggataaagaaaatatggtacatatacataatggagtattatttggccacttaaaaagaatgagatcctgtcatttacaacaacatggatggaactggaggtcattatgctaaatgaaataaaccagtctcagaaagaaaaacttcacatgttctcacttatttgtgggagataaatataaaaaaaaaaaatgaactcatggagatagagtagaaggatggttaccagatgttgggaagggtattaaggaaggtggggttggtgaagtggggagggttaatgtgtataaaaaaaaatagaataaataagaactagtatttgctagcccaacggggtgactgtagtcaaaaataatgtaattgtatattttaaaataattaaaagtgtataactggattgtttgtaacacagaggataaatgcttgaggtgatggataacccatttaccctgatgtcattattatacattgcatgcatgtgtcaaaagatctcatgtaacccataaacatatacacctactatgtagccacaaaaattaaaattaaaaatttaaagaaaactatatcctctgtgggcaaagatacatcatccagaccccagtatggtctcttcaaaccctacacattcaagcaaaacagacaacaaacactagtgcaagagaaggcatgactttgaattaaaaatgacagtcatttataaaaagatgcattggagatccagatcaaaagtcaactttaaaataagtgtgataaataggttcaaagaactaaatggccagacaaaaactttatcagatcactgtaaaataaagaatcaaatggaccttgaggaactaaaaattacagttactaaaaccatagtgaatggatttcattgtagagtagacacaactgcagtgagcagtagtggattacaagacagttgagaataaatgttctgattgaaacaaaaacatacacaatacgtttttttttaaatacaggaaaggttataaaaagcatgggatttaacaaaaaaggcaaacatacatttaattggaataccaaaagaggaatagaggcgagagtaaatgaaaaacaacacttgaagaagtaattgttaagaatcttttggccagcacggcggctcatgcctgtaatcccagcactttgggaggccgaggcaggtggatcacgaggtcaggagatcgagaccatcctggctgacacggtgaaaccctgtctctactgaagatacaaaaaaattagccgggcgtggtggcgggcgcctgtagtcccagctactcaggaggctgaggcaggagaatggcgtgaacccgggaggcggagtttgcagtgagccgagatcgcactactgcactccagcctgggcgacagagcgagactccgtctcaaaaaaaaaaaaaaaaaaaaaaaaaaaaaaaaaaaatcactttaaaactaatgacagagataaagacagatttgaaaggcactacaaacactaagcataaatagaaagaaaatcacgtccaggcacaatataaactgcagtgaacaacaaacgtgagaaaatctgaaaagcaatcagagaacaaaaggcagagtatctcagaagccaaataagacaggtagctgctttcttacaataaactctagaagacagaaatgatatattcagactgctgaaaaaaaattaagtacataatttaatataaagaaaatatactctttgaaaagggagtgaaatgaaagccacgtttagacaaaaatatctgaaaaaagattttgtcatcagaagattcacaccaaaggaagtattaaaggatattaatcttcagggtgcaggaaagtgatcttaaacgacagaggtgcaaggaagaatgaagggcaaaatagtctatgggagaagaaacatttctggaatgatagcgtaaggacctctgaaaatcttttttttcataaaacactggaaaaattatcaaaatcaacttcttcagaactctggaaattaaccaaaggctcgtgaaaatctgatgaatgtttattcaagaaaagttactaaatctaagtaagaagagcaagctttgtgggattttaatttgccttatttgcagtcccctctcccaactatatggtagctctgaaaaccatggagataaagatcctttcagtctagcaaccactgatggagtcaaaatggatttggtgcttccccaaaagcttcatctccagataattgttactttttgactcgtctgtcagttcacaaggaaagtccaattcacagtgtttatctttattgaactgactcagaacatgttcagtgggaaaggtcctgttacagtaggacacactgcgcatgctcgcctcccaagcgcaagcctggaactgtgcacgcaggcagcttaccctaacggaaaaatcaagggaaagccggtgaaagacactggaagtgggccaccgtataaaatcttaggttcaaggtcaaacagggcacttgacctccaagatgcctgcttggacctcttccaagtgtcctttctttttttttcattcctgctctaaagctttttgataaacttcctctcctgctctaaaacttgcgttggtgtcctttttctgccttatgcccctcagtcaaatctttgttctgagaagacaagaattgaggttgctgcagactcatacgtattcgccactggtaacccggataacttccaccgctaatactatgtccagggcatttgtgaaaaccaacaaacaaaaaacaaaacaaaacaaaaacagcagcagttatttaacacctagccgactgagctggcaatactagttagggcaaataagagactggccagaaaacatcaaaggaaaattttgagtggagtttttatttctggaaatggtataatcagttatttcagagtaatactctgaaaaacaacaaagacacaggtgtacaaaataaagtgcatttatcaatttgaaggcattagaaaactacctaattggagaatgagatgtccatatggggcttatcaaaacctctgatatataccgggggatctacaagaccatacacgtgggtatgtctgtggcccgaccaggacagacctaagcccttactctctcacagaaaggaacacaagcagagtgtggtggccttgttagcttgagaagacagagattagagcacagaagctgaagggctggagattgtgctgaagaaaactcgagaggagggagccattatcatgtgttcaggagttagagatgtggatatggagttttttctctggcttcttccctttcaggttttttttttttttttttcctacttcagtggtatttttctcgaaccagttttctggttcctcaggtagaaacacagtgggatttttcacaattacttcccacattgctgggtggcctcaaagactaattaaccctaggctaaaaagtcatgaaaaaatagaggtgcttaatgtttaccactccactgccctgcctggagggtgtatcctcatctgagcctgtctgctttcattccttcttcagtgccttttggtattatgtctaaattttaaagttgcttcctgataagtgagtgagtgctctgataggatcttcctccatcattagtagaatctttctgactggttaatctctagagttgcgaaaaaagttgatactgataaatacctgttagaaacttaatttctaaacatgtaacatctgttctacaaatatttactttaaatctaaaggcgataataagtttgatgtaaatatgaaccaatagaatgtaagatagactgggtgcagtggtctgtgcctataatcccaaaactttggaaggccaaggtgggagaatcacttgaggccaacggttcaagaccagcctggacaacatagtgagaactagtctctcaaaaacaacaataaaaaaattgaatgtaagacatatcaaatatgctcccatctctagttggcatgtaatgcctagcctgccattccctggacaagaacaacattatagtctctgcctctttctggagtacactgatcttgctggaaatagttaagtgaagttactgtgaccgcctaacacaggatgggatagagaattcttgcgaacaaagggtcagctgggaataaacaacaacctaaggaaacagaatgaccaaataatagcataaggtaggacatcccatccctatcagctgtcatagcttgtttgcttaattgattgattacttagcttgttgaatgaaaataaatatattttataacaaaagattgtgttcttggacatctcatttaattgacatcctcaaccaagtcttaattgtagcccgaggtagaatctaacttaaaaatgtatgcttacatttaataactggctgttgcctcaaatacaacagtattgcaacatatgtactctagccatccagtattttagttcccttatttttttaacatccaaaattagatattactattattaacttatacaagcaacttgttttatatttatatatgtattttattttacctgagacagggtcccactctgtcactcaggctggagtgaactggtatgttcactggtatgttcacggctcactgcagccttgacttcctttggctcaggtgaccctcccacctcagcctccgtagtagctgggactataggcacacgccaccatgcctggctaatttttaaagtgtttttttgtaaagattggatttttccatgttgcccaggctggtctgaaaactcctgggctgaagtgatctccctgccttggcctcccaaagtgctgggattacaggtgtgagtcacagtgcctggcccatttattattttatttgttcagtatttcttatgtcccagctgtcttcctgtactaaattttcttttctgatgtacctctgaagttcatttagttgagatgataaactttcaaaggtttggtttctgaaaatgcctttacttcactcttgttctagaaatagagtttggctatatacacaattcttgggatatgtattttctctcaacactttaagagctttccactctcctcttgcttcctttgttactcttgacattcctttttttttttttttgagtcagggtgtcgccaatggtgtgatcttggctcactgcaacctctgcttctggggttcaagtgattctcctgcctcagcctcgcaagtagctgggacaatagtaggttcaccaccacactcggctaaattctgtcatctgtcaatcatcaatccatcattaattacctattatgcctttatagatggtctgtcttttgtaatgattttaagatcctctttacggtagttccttgttatccatggtggggatatgttccaagaccctaagtgaatgccttaaactgcagacagtacagcactcagttgctgtccatcagaacacacttctgatcatcttttcttccacctgcaaatttaattcctttttccataactaaacacttatcatgcagtgtggttgtagttttttgtttgagatgtgagagcaaaaatagcatgacttttctttcttcacaatccacagataaaagattctttcttaaccagacatgttagagccctcaacatacaatttttttcctttacgttaagaactttcacttttcacttgaaggaagcacttacagcttctcttttcatgtctaaaatgccagcatcattaatctttttttttttttttttttttgagacagagtctcgctctgttgcccaggctggagtgcagtggcgtgatctcggctcactgcaagctctgcctcctgggttcacgccattctcctgcctcagcctcccaagtagctgggactacaggcgcctgccaccatgcccggctaatttttttttgtgtgtgtaattttagtagagatgggttttcaccatggtctcgatctcctgacctcgtgatccgcccacctcggcctcccaaagtgctgggattacaggcctgagccgccttgcccggcccagcatcactaatcttgccaaataaggtagagccaagtgaggttacttgaacacaagcactgggataaaacgacagtcagtctgataagcaagatggctgctaattgactagtaggtgggtgatgcagtatagttaccccggacaaagggatgattcatgttcagagtgagacacaggcagatgatatgaatttcatcatgctactcagaagagtacacagttggaatcttatgaattatttctggaattctccatttaatattttcagactgtttttggctgtgggtaactgaaactgtggaaagtaaagctctggataagggataactattatatttcttcaatgtttccattttcaccaaaatgtttctagatatatgtttctttgtatttgtcctgtttggatatgtttacagataccttttctccatgtaattattgacggactgttttatacaattgttagaatcaaaatgaagtctctggtgttaaaaactctgacaaatagagccagggaaggccatggagtgagtgttcttacacacaaatgcctaacaaggactatcacaaaagacaagtcaaaatcttcagcccaatatcttgagcagtaatataaggtatctctaaaatgtttccccacctgctttgactagtcaagcaaaccaaacttgcaaacaaaatagcaatttgttactgaaaaattcaaggctatttgcagactttctttttattctacaattcagccaatcttagctaaaatgtaaatatttgaatatttaactctaaactttttaaaaactaaaaatggaaaaaggggtaaaaggagcttatttcaaactgctatactttattcaaaattttggtccacagttttcatcagattacctattggaacaaataaaatgttgtcatgtgaacaagtctcattttgtcagaaatttaacttggatccaagcatccttgtataaactagtgaagttgtattaccaggttatactgtctcatgactaaaattctataatgaaagctatctttatttgtgtgtgtatttatgtgtgtgtttatgcacgttttaagttgtgtctacaaggtaaaatctagcaaagttggttagaaatcccttaagaaattttattcacattggcctagataaataagtactcatgaaataaatagctgttaagcagaatgacttttagttcctgcgacttaataaatctttgataataatctggttttaaatttgataataaaatacaaatagaaatgtcttcaaaattgtcagcatacatttttgcctggtttttatggccagacagttttatatttgtctctgttagatataaatgatttaactggtttaactataaacatagcctaaaaacagaataatctttgtgtaataatattaatattgttggtttagttaaaacaactgtgtcttctgagttattgacaaaatacccatatatttaactttcttacttaggaaaacacttgatattcacaggctgtcaaagtgcttaaaattatgactaattttgtctaatatctcagtttttataagtaatctaggtatagttaataaaaataaaaaattagacattaaatttcttaaacgtttataaataactttatgtaattaaatatcttaaatttatgttaaattaaatgttagatactcattaaatgtctgggtcattttcaaatcaataaaatgttaaatataaattactgaacataaatataactgtgtccttggcttcttaaatgttataaaaggctatatttgggtcaattaacatgaaaagtatgttataataaacatgtttctaaagttataaagtggttctgatatataaattattgacatgtaataagcaattcaaatttctttgttcttatgtttttactaaaattagaattactgagaattaaaaattataattaatatataattctgcatacaaaatgtaacaaaaactaaaatgtttttgtttaaaacattataaaaagacagatatatgttttttgttgaaaaatagttgtatctaaattcagcagtccctaaaggttgttgcaaactatggaattaggaaaaaataaaaacaataaaaaaacagtaaataagtgagagagatgtttaaatagctatacataaaaagatttgtttttgataaagaataaaaaaggttgaaaatttttgcatgaaaaaaatcttctatgataaatttttgtccccaactaaaatgactggttattttaagaaaaataaaatacaggacacaacaaaaggtctaagcatgctgtgaaatgtctaagtaataaaaaattttgtgaaaaataaatttgcaaacaaaattttgcatgtgatcaatttgactataatttaaaaaattatttgtctttttaaagattaagctttggtaaatgtacatgctgatttaaaactaaacatttggtctctatattagaacaacaaagatttcataaaatatttatttgcttgtaataaaatttacaaaaggttttgattttatttgagatctgtttctttaaattttcttttttttttttttttttttttgagatggagttttgcttttgtcaccaaggctggagtgcaatggcacaatctcagctcactgcgacctttgcctcccaggttgaagcgattctcctgcctcagcctcccaagtagctaggattacaagcgtgtgccaccaagcccagataatttttgtatttttagtagagatggagtttcaccatgttggtcaggctggtgtcgaactcctgacctccagtgatctgcctcggcctcccaaaatgttgggattacaggcgtgagcaaccgtgccaggcctatttttttaaattttcaatcatcctctgcatggcagctttacaatttagagaaacgttttccccaagtaaaatttaattctgcatatttaacttttcttgtctgaatcattcttttcttttttttgtacttttatttttttattatactttaagttctagggtacatgtgcacaacgtgcaggtttgttacataggtatacatgtgcaatgttggcttgctgcacccatcaactcgtcatttacattaggtatttctcctaatgccatccctctcccagccctccatccctccggcaggcccaggtgtgtgatattccccaccctgtgtccatgtgttctcgttgttcaattcccacctatgattgagaacgtgtggtgtttggttttctgtccttgtgatagtttgctgagaatgatgatttccagcttcatccatatccctgcaaaggacatgaactcatccttctttatggctgcatagtattccatggtgtatatgtgccgcattttcttaatccagcctatcattgatggatatttgggttggttccaagtcgtctttgctattgtgaatagtccgcaataaacatacgtgtgcatgtgtctttatagtaaaatgatttgtaatcctttgggtatatacccagtaatgggattactgggtcaaatggtatttctagttctagatccttgaggaatcaccacactgtcttccacaatggttgaactaatttacacgcccatcaacagtgtaaaagagttcctatttctccacatcctctccagcatctgttgttacctgactttttaatgattgccattctaactggtgtgagatggtatctcattgtggttttgatttgcatttctctgacgacctgtgatgatgagcattttttcatgtgtctgttggctgcataaatgtcttcttttgagatgtgtctgttgatatcctttgcccacttttttgatggggttgtttgattttttcttgtaaatttgtttaagttctttgtggattctggatattagccctttgccaagtgggtagactgcaaaaattttctcccattctgtaggtttcctgttcactctgatgatagtttcttttgctgtgcagaaggtctttagtttaattagattttacttgtctattttggcttttgttgccattgcttttggtgtttcagtcatgaagtctttgaccatgcctatgtcctgaatggtattgcttaggttttcttctagggtttttatggttttaggtcttacatttaggtctttaatccatcttgaattaatttttctataaggtataaggaagggatccagtttcagctttctgcatatggctagccagttttctcaacaccatttattaaatagggaatcctttccccactgcttgtttttgtcaggtttgtcaaagatcagatggttgtagatatgtggtgttacttctgaggcctctgttctgttccattggtctatatatctgttttggtaccagtaccatgctgtttttttaaaatgtagccttgtagtatagtttgaagtcaggtagcatgatgcctccagctttgttctttttgcttaggattgtcttggcaatgcagcctcttttttggttccatatgcattttagagtagttttttccaattctgtgaagaaagtcattggtagcttgatggggatggcattgaatctataaatcaccttgggcagtatggccattttcatgatattgaggcttcctatccatgagcatggaatgttcttccatttgtttttgtcctcttttattttgttgaggagtggtttgtagttctccttgaagaggtctttcacatcccttgtaagttggattcctaggtattttattctctttgtagcaatcgtgaatgcgagttcactcatgatttggttctctgtctgttattggtgtacaggaatgcttgtgatttttgcacattgattttgtattctgagactttgctgaagttccttatcagcttaaggagatttggggctgagacgatgggattttctaaatatacaatcatgtcatctgcaaacagggacaatttgacttcttcttttcctacctgaatacgcatcatttctttctcttgcctgattgccctggccagagcttccattaatatgttgaataggagtggtgagagagggcatccttgtcttgtgccggttttcaaagggaatgcttccagtttttgcccattcagtatgatattggctgtgggtctgtcataaatagctcttattattttgagatacattccatcaatacctagtttattgagagtttttagtatgaagagctgttgaattttgtcgaaggtattttctgcatctattgagataatcatgtggtttttgtcattggttctgtttatgcgatggattacatttattgatttgcttatgttaaacaagatttgcatcccagagatgaagccgacttgatcatggtggataagctttttgatgtgctgcgggattcggcttgccagtattttactgaggattttcacatcaatattcatcagggatattggtctaaaattctttttttttgttgtttctctgccaggctttggtatcgggatgatgttggcctcaaaataagttagagagggttccttctttttctattgattggaatagtttcagaaggaatggtaccagctcctctttgtgcctcttgtagaattcggctgtgaatccatctggtcctggactttttttggttggtaggctattaattattgcctcaatttcagaacctgttattggtctattcagagattcaacttcttcctgatttagtcttgggagggtgtatgtgtccaggaatttatccattttttctagattttctagtttctttcatagaggtatttatagtattctctgatggtagtttgtatttctgtgggattagtggtgatatcccctttatcattttttattatgtctatttgattcttctctcttttcttccttattaatcttgctagtggtatattttgttgatcttttcaaaaaaccagctcctggattcgttgatttttttgaaggttttttttttgtgtctctacctccttcagttctgctctgatcttagttattttttgccttctgctagcttttgaatttgtttgctcttgcttctctagttcttttaattgtggtgttagggtgtggattttagatcttttttgctttctcttgtggacatttagtgctataaattcccctctacactttgttttaaatgtgtcccagagattctagaacgttgtgtctttgttctcatttgtttcaaataacttatttctttctttttttttatggcttaacatatttttaatacgtttaggtgaaaatagtgtttcgtttctatgaggctgcatctgttttttgtttttgtttttgtttttaattttattattattatactttaagttttagggtacatgtgtacaatgtgcaggttagttacatatgtatacatgtgccatgctggtgtgctgcacccattaactcatcatttagcattaggtatatctcctaatgctatccctcccccgtccccccaccccacaacagtccccagagtgtgatgttccccttcctgtgtccatgtgttctcattgttcaattcccacctatgagtgagaatatgcggtgtttggttttttgttcttgcgatagtttactgagaatgatgatttccaatttcatccatgtccctacaaaggacatgaacttctcattttttatggctgcatagtattccatggtgtatatgtgccacattttcttaatccagtctatcattgttggacatttgggttggttccaagtctttgctatcgtgaatagtgccgcaataaacatacgtgtgcatgtgtctttatagcagcatgatttatagtcctttgggtatatacccagtaatgggatggctgggtcaaatggtatttctacttctagatccctgaggaatcgccacactgacttccacaagggttgaactagtttacagtcccaccaacagtgtaaaagtgttcctatttctgcacatcctgtccagcacctgttgtttcctgactttttaatgattgccattctaactggtgtgaggtggtatctcattgtggttttgatttgcatttctctgatggccagtgatgatgagcattttttcatgtgtcttttggctgcataaatgtcttcttttgagaagtgtctgttcatatccttcacccactttttgatggggttgtttgtttttttcttgtaaatttgtttgagttcattgtagtttctggatattagccctttgtcagatgagtaggttgtgaaaattttctcccattttgtaggttgcctgttcactctgatggtagtttcttttgctgtgcagaagctcttgagtttaattacatcccatttgtcaattttggcttttgttgccactgcttttggtgttttagacatgaagtccttgcccatgcctatgtcctgaatggtaatgcctaggttttcttctagggtttttatggttttaggtctaacgtttaagtctttagtccatcttgaattagtttttgtataaggtgtaaggaagggatccagtttcagctttctacatatggctagccagttttcccagcaccatttattaaatagggaatcctttccccattgcttgtttttctcaggtttatcaaagatcagatagttgtagatatgtggtgttatttctgagggctctgttctgttccattggtctatatctctgttttgataccagtaccatgctgttttggctactgtagccttgtagtatagtttgaagtcaggtagcgtgatgcctccagctttgttcttttggcttaggattgacttggcgatgcgggctcttttttggttccatatgaacttgaaagtagttttttccaattctgtgaagaaagtcattggtagcttgatggggatggcattgaatctataaattaccttgggcagtatggccattttcatgatattgatccttcctacccatgagcatgggatgttcttccatttgtttgtatcctcttttatttcattgagcagtggtttgtagttctccttgaagaggtccttcccatcccttgtaagttggattcctaggtattttattctctttgaagcaattgtgaatgggagttcactcatgatttggctctctgtttgtctgttgttggtgtataagaatgcttgtgatttttgtacattgattttgtatcctgagactttgctgaagttgcttatagcttaaggagattttgggctgagacaatgaggttttctagatatacaatcatgtcatctgcaaacagggacaatttgacttcctcttttcctaattgagtaccctttatttccttctcctgcctaattgccctggccagaacttccaacactatgttgaataggagcggtgagagagggcatccctgtcttgtgccagttttcaaagggaatgcttccagtttttgcccattcagtatgatattggctgtgggtttgtcatacatagctcttattattttgagatatgtcccatcaatacctaatttattgagagtttttagcatgaagggttgttgaattttgtcaaagcccttttctgcatgtattgagataatcatgtggtttttgtctttggttctgtttctatgctggattacatttattgatttgcgtatattgaaccagccttgcatgccagggatgaagcccacttaatcatggtggacaagctttttgacgtgctgctggattcggtttgccagtattttattgaggatttttgcatcaatgttcatcaaagatattggtctaaaattctcttttttggttgtgtctctgcccggctttggtatcaggatgaagctggcctcataaaatgagttagggaggattccctctttttctatggattggaatagtttcagaaggaatggtgccagttcctccttgtacctctggtagaattcggctgtgaatccatctggtcctggactctttttggttggtaagctattgattattgccacaatttcagagcctgttattggcctattcagagagtcaacttcttcctggtttagtcttgggagggtgtatgtgtcaaggaatttatccatttcttctagatattctagtttatttgcgtagaggtgtttatagtattctctgatggtagtttgtatttctgtgggatcggtagtgatatcccctttatcattttttattgcgtctatttggttcttctctcttttcttctttattagtcttgctagtggtctatcaattttgttgatcctttcaaaaaaccagctcctggattcattaatttttgaagggttttttgtgtctctatttccttcagttctgctcggattttagttatttcttgccttctgctagcttttgaatgtgtttgctcttgcttctctagttcttttaattgtgatgttagggtgtcaattttggatctttcctgctttctcttgtgggcatttagtgctataaatttccctgtacacactactttgaatgtgtcccagagattctggtatgttgtgtctttgttctcgttggtttcaaagaacatctttatttctgccttcatttcgttatgtacccagtagtcattcaggagcaggttgttcagtttccatgtagttgagtggttttgagtgagtttcttaatcctgagttctagtttgattgcactgtggtctgagagatagtttgttataatttctgttcttttacatttgctgagaagagctttactaccaactatgtggtcaattttggaataggtgtggtgtggtgctgaaaaaaatgtatattctgttgatttggggtggagagttctgtagatgtctattaggtctgcttggtgcagagctgagttcagttcctgggtatccttgttaactttctgtctcgttgatctgtctaatgttgacagtggggtgttaaagtctccgattattaatgtgtgggagtctaagtctctttgtaggtcactccggacttgctttatgaatctgggtgctcctgtactgggtgcatatgtatttaggatagttagctcttcttgttgaattaatccctttacgattatgtaatggccttctttgtcttttaggatctttgttggtttaaagtctgttttatcagagactaggattgcaacccctgcctttttctgttttccatttgcttggtagatcttcctccatccttttattttgagcctatgtgtgtctctgcacgtgagatgggttcctgaatacagcacactgatgggtcttgcctctttatccaatttgccagtctgtgtcttttaattggagcatttagtccatttacatttaaagttaatattattatgtgtgaatttgatcctgtcattatgatattagctggttattttgccagttggttgatgcagtttcttcctagcctcgatggtctttacaatttgacatgattttgcagtggctggtaccggtttttcctttccatgtttagtgcttccttcaggagctcttgtagggcaggcctggtggtgacaaaatctgtcagcatttgcttgtctgtaaaggattttatttctccttcacttatgaagcttagtttggctggatatgaaattctgggttgaaaattcttttctttaagaatgttgaatattggcccccactctcttctggcttgtagagtttctgccgagagatccactgttagtctgatgggcttccctttatgggtaacccaacctttctctctggctgcccttaacattttttccttcatttcaactttggtgaatctgacaattatgtgtcttggagttgctcttctcgaggagtatctttgtggcgttctctgtatttcctgaatctgaatgttggcctgccttgctagattggggaagttctcctggataatatcctgcagagtgttttccaacttggttccattctccccgtcactttcatgtacaccagtcagacgtagatttggtcttttcacatagtcccatatttcttggaggctttgttcatttctttttattcttttttctctaaacttcccttctcgcttcatttcattcatttcatcttccatcactgatacactttcttccagttgattgcatcggctcctgaggcttctgcattcttcacgtagttcttgagccttggctttcagctccatcagctcctttaagcacttctctgtattggttattctagttatacattcgtcttaatttttttcagttttcaacttctttgcctttggtttgaatttcctcctgtagcttggagtagtttgatcatctgaagccttcttctctcaactcatcgaagtcattctccgtccagctttgttccgttgctggtgaggagctgcgttcctttggaggaggagaggcactctgctttttagagtttccagtttttctgttctgttttttccccatcttggtggttttatctacttttggtctttgatgatggtgatgtacagatgggtttttggtgtggatgtcctttctgtttgttagttttccttctaacagacaggaccctcagttgcaggtctgttggagtttgctagaggtccactccagaccctgtttgcctgggtaccagcagtggtggctgcagaacagtggattttcgtgaaccgcgaatgctgctgtctgatcattcctctggaagttttgtctcagaggagtacccggcagtgtgagacgtcagtctgcccctactggggggtgcctcccagttaggctgctcaggggtctggggtcagggacccacttgaggaggcagtctgcccgttctcagatctccagctgcatgctgggagaaccactgctctcttcaaagctgtcagacagggacatttaagtctgcagaggttactgctgtctttttgtttgtctgtgccctgcccccagaggtggtgcctactgaggcaggcaggcctccttgagctgtggtgggctccacccagttcgagcttcctggctgctttgtttacctaagcaagcctgggcaatggcaggcacccctcccccagcctcgctgccaccttgcagtttgatctcagactgctgttctagcaatcagcgagactccctgggcataggaccctctgagccaggtgcgggatacaatctcctggtgtgccattttttaaacctgttggaaaagcgcagtattggggtgggagtgacctgattttccaggtgccatctgtcacctctttcttcgactaggaaagggaactccccgaccccttgtgcttcccgagtgaggcaatgcctcgccctgcttcagcttgcgcatggtgcactgcacccactgtcctgagcccactgtctggcactccctagtgagatgaaccccgtacctcagatggaaatgcagaaatcacccatcttctgcgtcactcacactgggaactgtagaccggagctgttcctattcggccatcttgactccagcccccataacttatttatttctgctttcattttgttatttacccagtagtcattcaggagcaggttgttcagtttccatgtagttgtgaggttttgagtgagtttctgaatcctgaattctaatttgattgcattgtggtctgagagacagtttgttgtgatttctgttcttttacatttgctgaagagtgttttacttccaattatgtggtcaattttagaataagtgcattgtggtgctgagaagaatgtatattctgttgatttggggtggagagttctgtagatgtctattaggtctgcttgctgcagagctgagttcaaatcctggatatccttgttaaccttctgtttcgttggtctgtctaatattgacaatgaggtgttaaagtgtcccattattattgtgtgggactctaagcctctttgtaggtctctaaggacttgctttatgaatctgggtgctcctgcatttggtacatatgtatttaggatagttaactcttcttgttgaattgatccctttaccattacgtaatcgtcttctttgtctcttttgatctttgtgggtttaatgtctgttttatcagagactaggattgcaaaccttgctttttttttttctttccatttgcttggtagatcttcctccatccctttatcttgggcctatatgagtctctgcacgtgagatgggtctcctgaatacaacacactgatgggtcttgactgtttatctaatttgtcagtctgtgtcttttaattggggcatttagcccatttacatttaaggttaatattgttatgtgtgaatttgatcctgtcattatgatattagctggttattttgccagttagttgatgcagtttctttgtagcatcgatgctctttacaatttggcatgtttttgtagtggctggtaccggttgttattttccatgtgtagtgcttccttcaggagctcttgtaaggcaggcctggtggtgacaaaatctctcagcatttgcttgtctgtaaaggattttatttctccttcacttatgaagcttagtttggctggatatgaaattctgggtcattctatgtaaccaggaaatttcctcttattttactaagaaccatgactttctctgcttaaggtgttacttgttttttcccataaaatatggtatacactcataatcttgaatacgtgcttttcctgtgtgatgaaattcaagtaccttttaatcagctttgacttctaacttatttaaattagcttcccaggaagggaaacaataacactggagaaacttttttttatctttgtggtaaacggcctaaaaaacaaagactttgcagttttatcagataatttcctatgtttcatgttctctttgttgagttttttgattagttaagaaaactgagctttaaaaagtttaagtctttttttttttaacatctgtataactttccgtattgcttttaaagtatttcattatcactttgggtaaaaaaatgactataattttacagatacctgttatattctcttgatagggtgtgttttaaaccttttgtaatctttgacagggtttctatgtattaaaataactaaattaagtctttctgccttaaaattactttggaatatttcagttgggcccctagagaggatcaatggacatatctctcatcttgtacagatattaagtgattaggtttatttagtaattgtataaagaaagtcaaatgataagtgatgttagatcttttaattacatttacaggtatgttattgatatgacgatcataaaattatataatattcttaaaaatctagtatgtcattagtcataattctggttattatattgaatgccacaaaataaccgaatttccttgtctactgcttcacttccatcagatttttaactatggctattctaaatctctgtcatccatagtttttacttccttgaatgtacacatagtttatcatgggactcttatttccattgcaatgccttttcccaaatattattttttaaagaaagtctttatttctggttgttatttgggttgacagtttcatccattttgttgtatctctatgatttccttttcatattattaatacagccagcacaagggaaaagagactgttgggaaagcacactagcctcttaaattatttggcccaatgtgacatacaccaatcattttcactcacctttcattagacaaacactagtcacatggctacctctgggagctaatggggctagggaaatgtacaacctggttgggcagctgctctatagccaatccttttattttcagccatagaacacatttgccctctactcaaggaaaataatgcaaattctcattcccttcttatatccagaaaaacagtccaagctctctggatgatgttcagtgtagtaggctgaataatggtcacccaaagatatgacatcctaattcctgggacctataaatgttactccataagtaaaaagcaactctacagatgtgattaaggatcttgacattggagattagcctggattagctgagtggactttagatgcaatcacaagtacccttaaaagtgaaaggcagaaagaaatttgagacagaagagaagacagaaaaggagaaggccacgtgaagatggatgcagagattataggatttggatgcagcaaaagtatgccatttaccacccaaactggatgagataaggaatggtcttccagagcctctggagggaacacagccttgccaacaccttgatttcagccaaggaaactgatgttgaacttctgactccagactatgagagaaaacatttttgttatttgaagtcaccaagtttgtgatcatttgttacagagccataggaaatgaatgactgacagtgactcttcatgatcatttgagcatgtttttgagtggtcctaaggacagttaagcaatcagtagatcttctttttccttcttggaaggggaaaaggactttttagcagtggataccacattatcatctctgatacttttggtctgatgagataaagattgatattagttcacggtgagaaaagcactggaaaacatacaaagatggtctgccttttcagaatctgctttggtgtttccacagtcctcttttaacatagatacacaagagactatgtttatcagaatttcacccattacaatcaattactgtttgtgtgtattccttctgtgtgccttacctgttatcagtggtgcttaaggaatgagagacttgacctaaaatattttcgtggtgacaagattttttgatcaccctatatcttttcaccccactccagctaatatcatcctgatttctattgggttagttaactctcccaattttttagattaaaactacagtgctcttgtcttctctaagcaaggaataggtatatgacctaagcttcagatattgggcttaccttccaaggactttgacttttaagcagaagagtggtaaagacagagagtgtttggatgtcattactttctgcagttatcttttgcaggatgatcaagttgtgcctgctgcctggaactctagaacaactcttgatccagatttttcctgaagttctctagactttctgtcaatcgtgtatgctgcccaatagcatcaaaataaatttttttctagtttttttctttaaaaattttacttaaaaattttcccccaatcatcagaacctatgaataaaacaaattttatacttgcttaggttggacattgatatggtttggctctgtgtctccacctgtattagtccattttcatgctgctgataaagtcacacctgagactgggcaatttacaaaagaaagaggtttaattggactcacagttccatgtggctggggaggcctcagaatcatggcagaaggcaaggaggaacaagtcacgtcttgcatggatgacagcaggcaaaaaaaaaagaaagtttgctcagggaaactcccatttctaaaaccatcagatctcataagacgtattcactatcaaaagaacagcatgggaaagacctgcccccatgatttaattacctcctaccaggtcccttccacaacacatgggaattcgagatgagatttgggtggggacacagagccaaaccatatcgttccgccccagcccctcccaaatctcatgtcctcacatttcaaaaccaatcatgccttcccaacagtttcccaaagtcttaactcatttcagcattaactcaaaagtccacagtccaatgtctcatctgagacaaggaaagccccttccacttatgaggttgtaaaatcaaaagcaagttagttacttcctagatattatgagggtacaggcattgggtaaatagagccattccaattgggagaaaatagccaaaacaaaggggctgcaggccacatgcaagtccaaaattcagcgggacagtaaaatcttaaagctccaaaatcatatcctttgactccatgtctcacatccaggtcacgctgatgcaagagatgggctcccttggacttgggcagctctgcccctgtggctttgcagggtatgcaccccttcctggctgctttcatgggctggcattgagtgtctttggctttaccgggtgcacagtgaaagctggcagtggatctaccattctggggtctggaggatggtggcccttttctcacagctccactaagtggtgcctaaatagggactctgtgtaggggttctgatcccacatttcccttctgcactgccctaacagaagttctccatgaggaccctgcccctgcagcaaacttctgcctgggcatccaggtatttccatacatcttttaaattctaggtggaggttctcaaacctcagttcttgacttctgtgcacccatagtctcaacaccacatggaagctgccaaggcttggggcttccaatctctgatgccacagcccaagccgtaacttggccccttttagtcacagctagagctgctgggattcagggcaccaagtccctagactacacacaacatggggaccctgggcctggcctttcaaaccttattttcctcctaggtctctgggcctgtgatgggaagggctgccatgaagacttctgacatgccgtggagacattttccttatcatcttgaggattaatattcagctccttgtcatatatgcaaatttctgcagacggcttgaatttctcctcagaaaatgagattttcttttctatcatattgtcaggctgtgaatttttcaaacttttatgctctgcttctattataaaaatgaatgcctttaaaagcacccaagtcacatcttgaatgcttctgcttagacatttcttctgctagataccctaaatcatctctctcaagttcaaagttccacaaatttctagggcaggggcaaaatgccaccagtctctgctaaatcataacaagagtcacttttgctccagttcccagtaagttcctcatttacatctgagaccacctcagcctagatttcattgtccatatgattatcaacgttttggtcaaagccattcaacaagtctctagggagttcaaagtttcccatgttttcctgtgtacttctgagccctccaaactgttccaacctctgcctgttacccaggtccaaagttgcttccacatttttaagtaccttttcagcaataccccactctactggtaccaatttactgtattaatccagtttcatgctgctgataaaaacatatctgagactgggcaatttacaaaagaaagaggtttattagacttacagttccacatggctggggaggcctaacaatcatgttggaaggcaaggaagagcaagtcacaccttatgtggatggcagaaggcaaaaaaaagagcttgtgtagggaaacttccatttttaaaaccatcagatctcatgagacttagtcactctcacgataacagcatgggaaagacctgccttcatgattcaattacctcaccaggttgttcccacaacacgtgggaattcaagatgagatttgggtggggacacagccaaaccatatcaccacccaaatctcatgttgaattgttatcttcagtgttggacaggaggcatggtgggaggcaattgtatcatgggacttgatttccctcttgctgttcctgtgatagtgagtgagttctcatgagatctggttatttaaaagtgtgtagcactttcccttctctctctctcctgccaccatgtgaagtcgtgcttgcttcccctttgcccttcctccatgccatgattgtaagtttcctgaggcctccccagccatgcttcctgcacagcctatggaactgagtaaattaaacctcttttctttataaattacccagtctcaggtagttatttatagcaatgtgaaaactgactaatacagacatcataaatgtctgttgtttgcaactaaataatcttaaatctacaggaagtgatgaaagtaagttctgatatctcgagggaattttccacttggaagagaggaaggaatagcacagttaaatggataatttataaaaagaagtgttgacctacatatttatttaggtaatggaaataccttaatatctctgaaaattatctagttattttgacctatgtgctttttaaaatgtccatattgatgataaggagtggcttttcattccggtaaattcattctgctttgaattatgtaatttaacatgtattcaaattacttctatttaaaagtacacaaattgatctcattttcacttggcattttaatttatcaatacctgtgtggatatttcacagtattttcagtacaggaaatttccttccaaacagtagagattagatacatgtattgtataagatggtatatttatattgccataaatggatacgttaaaaataatgtctacttcaagaaagattgtgggactttattttgttaaagtaatattttggatttcctacatttttatgtcattattttgaaacaaatttatatgcgtaccattaattattattgaatttaaaactgcttgaagatgtatatcattctgggatcaattaggatacaagacccacattgtaattttaacagagaaagtttaatataaaaattaataactataacctacctacgttaccaaccaagtgaaaaaagaactctaaacaatagtggaattgtagatataggaaacagccattacctgtgggcctaaggcaagagcatcaaaggaagaaacaaatctggagtaagtacccttctctgccatttgagaggctggggtcacggccatggcccattgattagtggaaaagttctctgaggaatattgccagcagaaattgctaagaagttgtcttctgggatgcttgggaaactatccacaggggcagttgcttcatggaatttgctagtaagctgcttgaagggaggctgccctctgaaatgccaggggaagctgcccatgcaaaggtgccatgcagcagagctcactggagggtggccctactgcattttccgtgccctgctatatgctgtgtaccacaggagcaagcagagaaaaacactggaaacaagccctgttttccttcagtgtttcctagagccatctgctgacaacacgaacattgggcatctgacagaggagaaatatttataaggtttagctccagtatcacaggcagagcaatggaggatggatttggagctgcaaggcaataaactggtaactgaacaaagtaagtagaattgcttttttttttcctaagtgaaaacaaggggtcttgcaagacttggaattcacagatttatccaacaagggaaaacagtaaaattttacatatggcttcatatagttgtttaaacttcataaacaagaatctagttaatgtttagtttttggaatattcctttgaaatatttaagtgcatttatgcagtgaaagtgtcagaattctcagttttagcctgtgaatatgctctattggagaatttttttttaaataaaagatactgcctggtcataaacagttcattccctagggggaatgtctgtggtttcttaaaaattgagttggggtagtatttgcatggttcaagccaagctgattttggtgtattgctgaatcatccaagacacggagttgtattccatttaacctgattggatagaaataaacataccatgtgttgaggttgcatctacaatacattgtaaattgtaaagtgctatgtaaatctactctagaagtatttctgttttgactctactttttctaatgttatataacttttataacgtttaaaaaattctctttgtaaaatcattcttaacagctgttgaagtgatatcacagagctcatcagagagaccaattcaaaatactatttataactctctgtgactgtaggagtttactataaaataacagcttctagatgtcatctagaggaaaactaactctttcccaagtgggcctgaacgttattagaacttcagatagctgtcaccccttaggcatttctgcagaaataccgtcatttcatattacacttgtaatgttctgaatctttattgtccagagtttgttttgcagtggctgtagaaccaatcaaagaggaatgaaattgaagtaatggcttgctatttcccagtgtattccacagaaatatgatgaaatcctatcatcagaatgaatgttttataaaattgagtttatttttgtgctaagatttctagagtttaccttctaacataaggttccagcatatcccgaatttaattttaaaaggcttgggagtttccaaatatcattaccatattttccaatcatgcacaaccaatttgtaatttaagcagaaaagaaaatagagcatgagtaaggctgaagtgtttgcatctgatacacctgcctaaactgtgtagctgaaagagtggatatttcagataccacagggtggagcatgggccactctgtaactctattgtagaaactgctttttaagttttctggagtagagttgttatttaattaagtaatatagatccccctctaaaaattagtcccctcccaaattcctcatctcttaattactgtaaatactggtttcattttgcttgcaagtagttttctgcttcctacatttttgaggtttactaatttggaaagaattataatttgtgtactctacctcatataactcggtaatactacagagtccatggtagaaaagtttcattttccgtgttttggtcaattttcaagaactcttattcataacatagtcagttttatttgctttataagacaataatttcttacaaatacaagaatgttagaactgccatttaagagaaaaaagcttcctgtcttcctttatttaaatattaaaattagaaaatcccttttgcctaacaacattcatccctgagattcagataccttcaaataaaaccaataaaggtggaaagtgacacatttatccttttacatttgatttaatggaaaagttagtcatccacaattttttttctcttgaaaataaaaaccagacgaaaaaatcatgttaaggcaaatggccacacaatttcagatattcaatggttttgaaatctcaatggagtctttcaattgttgcttttaagagagaaaggtttacaagaacttttatagtcttatctcacagggaaaaatattctataaaaaggcttatattgcttttgaatcatgccattatctcataaataaagactcaataaaaattgactaaaaaagagagagaaaagaaacagtatttaaagtgagatggtatattaaaaatgatcaaattcaataaaacctttttgggcttgtttttcaaataactagatactaagaactcattaaggaagaaaggtagttcagagcaactagaaaattaattaactatttaacttaaagtttgatgggcacttgtctttaagggttccattctcacaaataatattcataattatgtttgacaatatttgaataatcctgatttacaagcaattaggtatataggcacttgtaaatgattatgggatgtatgtacagggattgtaagggatggtgaaagaaaatatgcaaatgattgtggacaaatgaaccccaatccataacacagctgacaataattggtatacatggagtagaacacatacatttttgaccctaattcttaagtttttaacctacattccagtctcatgttgtaaaaagccattattaattgctgtcattaacttttttttttttttgagatggagtctcactctgttgcccaggctggagtgcattggtgctatcttggctcactgcaacttccgcctcacaggttcaaatgattctcccacttcagctgcctgagtagctgggattatgagcgtgtaccaccatgcttggctaatttttgtatttatagtggagacagggttttactatgttggccaggctggtcttctaactcctgatcccaagtgattcacctaactcggcctcccaaattgctgggattacaggtgtgagcactgcatctggcctgctgtcattaacttcttagtggttggtgctgggtgaccatttgcataaatacatttcattaaatgggaattataattcattagctatattgagctgtcccacttcaccaacgtttatagtaaatctgatacataataacgactattaaattctttgtcagataactccatctgtgccagtttgttcttggcatctattgattgttttttacatcgttcaagttgagatttttctggttcttggtaaaaggattcatttgtgactgtatcctggacattttgtgtggtacgttgtgagactggatcttatataactctgttccacaggttcctctgaggctggcaggggatgtgacaggatctcttcatcactgccatgtgaaaaccaaatccaggttccccactaggcctctgtagacaccatgctggagggaggtggcagggagggggtacctcattacttctgagtagggttgagaatttaggcttcctattcaacctttgctgacacctgcctggctggaatgccttcttattgctttcttcacagcttccactgacaccacagggcaggagtggaagtggcctcacccttctgcgggcagcggggagagtttggactctccactaggcctcctctgacgccactaaagggtggaggggaagatgctttagtgccacagcatgagggtgtaagtccaggctccccatgtgctctttgctgacacctgcagagtggggtggggtttcttatgtttgatggagatgaacttcccaaattcccacacagccttctctgaccacccagcaggagtggagtgtgcagagtgcctgagcagctgggtcagagtggaaatctagtcttcctactccacatttgttgatctaagagggggtgagaccacagttttttctggcctatttgtttggatgtgagctgttattttttagtttccttttttcttatccttttggtggagaaaaacaggcttttgtagagctctactgtttgtgaccattagcatttcctgattgctggcatcttcagtttccaatctggaaaatatgaggcggatctatataatatatgagactcaggtgtctcaccatagcaccattctttgggtccatagtccttagctagtctgtcctctctctgcctttgagagccttcttattttgatttatatatggtgttgaagatatttagctttacttagtgggagaaataaggaaaagtgcctctccatgtttctaaactgagaaagagttttcagtgatccatagtagaaataataaaagaaaataaagctttagctatatgggaataggatggaagaaaggtaccaaaaaaggcaaagacaaaacaaaaaagggggagggggatggccattgatttgactgaatctggttaaactgcactttggcaatgataacagcatgttcccacaacagtattttccaacctcggccacactgtcctcaaatatgcagacttaccccatgctatcccccaggattgtggcaggccaggtttcactaacgcaggcctccgtgacaactgtttcagcactgactgagtggttaagttaaatattaaaagctaaaaaagccagtgcccttatacaaaggctggaatgtaacaaaagcccattaagagtttttcccagacctttcctgggccttaaagcgtgacaaaataatgaaggaattcctaacagtacccatttaggtttaaacacgttttactgggggtctgaagaaactccccaaacctccgtgatttagcaggagacaagataaaggtaatcaccccagcacctggacccatttagactaaatttactgaggctctagaagcaggtcttcaggcctcagaccttagttatagatgaaaagaagttaatcacttatgtctttagatgaatgcacacttacacgtagacatatagcttagaaggtatataagctctgaaaagctttgtaattttgagttggtctggcgatcatttccaggccttctccctgtaactggttacagaaataaaaactcttcctccccatttcatctgcatcttgttattgggccctgaaaaacagcagcccgaccctcagcttggtctggaaacaggatgataggacatgaatgcccaaatctttggggacaaactggctgaacgattgactgtggctcaccgaatctttctccagcatttttgcataagtcctgggtggatctggcttgcagtgtgactgcctgcttttatggttgtgtgataaacaaacttcatttgtttattttcttttttctctacccatgcgcaaacttggcttctctcattatggtttcaggcaaaagcaatgtaaagcttggtgtcaccagaaatttcattcaagacagaattttgtggtttgactagacttgtgagctctgagatttttttttcttttttttttttgagacggagtctcactctgtcacccaggctggagcacagtggtgtgatcttggctcactgcaacctccgcctcccaggttcaagtgattctcctttctcagcctcctgagtagctgggactacaggagcgcgccaccacgcccggctaccttttttttcttgtatttttagtagagatggggtttcaccatgttagccaggacggtcttgatctcctgacctcgtgatccacccacctcagcctcccaaagtgctgggattacaggcgtgagccaccgcgcccggccgagctctgagattttgttagcccactgcttgtagcctcaaaatatcccaatccagccaggtgcagtggcttatgcctttaatcccagcactttgggaggctgaggtgggaggatcacctggggtcaggagttcaagaccagcctggccaacatggcaaaaccttgtctctactaaaaatacaaaaattacccaggcatggtggtgcacacctgtaatcccagctactccggaggctgaggcaggagaattgcttgagcccgggaggcggaggttgcagtgagctgagatcatgccacccaactccagcctgagcatcagagcaagactctatctcaaaaaaaaaaaaaaaaaaaaaattccaatccatgaaaattaagttgtttttagaaggacattttcaagaaatctaaaaatcccctatccttcaactttccgatgttctggcatcaaagtcacaattcccatatttgttacattagaatcatacctgatattcatttcatgctctctcaatttacccagctggggtgagactttgggaaataagattgatgtttaaaaacaagataaaatcatgacagagaaaccagtaaatacttattttacaaaacttaacacccaacatactaccttggatcagtgttggaatttactccgcatattcaatcaggaaactatagtttattcaaccatgtgccaagtctatagtttcaatatgtgcttttttgctccactttaaaaagtgaggcaggccctgaaagagttcgaggcaatttcattcactatctgtgtcctatatcacaaaaccttgtgaatactctctgcaaagggtgctgagataagggaaagtatcttaagtcaagatctggactggaaaggctcatgatattaatttatttctagtagcaatgcaaggagaactacacttatcttttcacatatgagttggggcacatcgggaacttcatgagaacatttgtgaacaacttcagaagcttgcaatggtctctgtctagttttaccatctcagtaggggtcatgcttgaaggacgagggttacctccattgagtatttgcattttggaagaaaatagagataattggtatctcattacattttaacacctgtatcagtgattcgcacatagtaggtattcagtagcatttgtgcattgactaaatgcctcattataaaaaataatggtcattttcaagcatcacagtccctaaaatactagataggactcaagctgcttactgagaccctaagagataacacagctcttggatatttggtccagttgacaaacaactgtaaaagtcatggggtaatattatgaaatattagaagatgagagagattccctcatcgttgcttttctttgtactctttgcttttcacccaattaatcaactacaatattacttatatccttacttatttcccaaatattaaattactggcattttagtctcttccacatgttttttttaaagagtattttatgagtaacacaaaactgtctgcctgtctatcaaagtaataaagtttcctggagctgaagaaaagagatgagtaagatggtgaagcaacaagtgaataaatagtgggagtcccttagagaagggaaacttcacctctcccgcatgagggatcattcagacactccagataggtttagaggattgtaacagaaggagtgcctcatttcctttcctgtgtacagcccatgcaggcatcagtcttacagaatagaaaccattgtttaacatacttaatcagatgggtctgtatattacttatactatacactagcccataataacagacccaatctagtaatggctagacaaaaaagagaagtttatttcttgatcagcatcagtcctattgggtgttccagaagatggctttctaaatcattcaggaagcaaggtcctttccagcttgtacagcttgtgtctctgcaacctcgagggcttttcttgtctgtgtcatgacaacagaaggggaaataacacagagtagtgtgggtcggggtgtggggccaggcctggaagtggtaccagttatttctgctcatatctcattggctaaaactcagttacctgtccacacctcccaacaaggaaatatggtatctttgtccaggaaaaagacaaaatggatttagatggacaactatctctgctaaacgatttgggcaacgatctctgccaaacttaagataacacgctttcctcacatcccagcatgatacctgagaagtacgaatatgccctgaaactaagaggagtaaggaaacagcgagagattatagatagcctcatcttgtaagtctctggctgtgtgatgaggaacgggaggatgatctcatgggagtcagcactgagagagtgtacctgaagaaaccctgtgaatgggggaccaatgacttagcagtgacctgtttggacagaaatctacagaccaaaatgaatggtggatttctcagcagatctcaggagatgcaagtacagattatgacatgagggccagatgccctgctcctctcacccaccccagcatttgaaacccaatggtaaggccattcaatggatatcaaattgttgtgatctaactgcttggaagctggtaatagaaaacaaactaagtatagaaaaataaaattgtattatgtgcacatctgaatttttatactgagttttgcatccaccacacgtatctacttattatttaaatcatattgcaaaagcaattaaggatctcttatgatttactgctttgaatacactagtcttctaaatgtctttattagtttttaagaaatttagctgccataaacatccttgaaattgcataaagtagttatagaccttgatgtacagatgttccttatttcataatggataaggataaaaggctccccacttccactcaagactgattcttaggcatattatgtaataactttgtgatttggggtgagttacaatatttttctgtgctccagtttccttatctgtacaatagcaatattgaactacttaattcttaggattaatgtgagaattaaatatgggaatatattaatgtgtgttctatttgtagcctcaaattaccacctcttactcctacttcagcctttcttccacctgaaattattatatttattaattctccatgagaatataccatcttgttttcaaaatgagacaaacactctcttggcttgtaagttttgacaaaaatatatacctgtacaaacaccaatcttatcaagatatagaacatcatccacaaaagttcccttctgttcctttgcagttaattcctccccacccaccccaataccaggtagtcactaacttgctttctgtcactgtagatttgttttgctaattatataatctcatgtgaatggaatcatacagttcaaatacaaacattcaggccatagcatctgtcttattaatcaattttataggttgtatagggctagctcattagagtttcaatttgcatcattttgatgattaatcatgttgagtatttttttatgggtttattaggccatttatatatatttatttgtgaagtatcttttcaaatttttaccttttaaaatattttactttactattgaattataaatgttctttatatattctggatgcatgtgatttgctggatatatgtattgcagatttttttctcctagcctgtggctttcatatttatttttataattgtatctttctaggagaaaatgctttcaaatctgatgcagtctttttacgtttatgtctgtgatccattttaagttcattttcctgcatggtatgagatgaacattgagaataatttgtccaaaactgatatccagttgtttcggccctgtttattgaaagaactatcctttccatgttgaattaccatatgcattagtcagggttctctagagggacagaactaataggatagatgtacatatgaaggggagtttattaaggagtactgactcacataatcacaaggtgaagtcccacaataggccatctgcaagctgaggtgcaggaaagacagtccaagtcccaaaacctcaaaagtagggaagctgacagtatagccttcagtctgtggctgaaggcccaagagcccttggcaaaccactggtgtaagtccaagagtccaaaggctgaagaacttgcagtctgatgttcaaaggcaggaagcatccagcacaggagaaagatgaagtccagaagactcagcaagtcacatccttccaagttcttctgcctagtttattctagctgcgctggcagctgattagatggtgcccacccagattgagggtgggtctgcctctcccaatccactaactcaagtgttattctcctttggcaacaccctcacagacacacccaggaagaattctttgcatccttcaatccaatcaagttgacaatattaaccatcacaccttggtatatttcttgaaaatcaattgattatatgatatatgaatctatttttagactttctatttatctgttctttcagttcaacattctaactatggtagtgtattataagttctgaaatcaggtataaaactctttcaattttgtttcatttaaaaaaattggtttggctattctatgccttttacattttaatactaacttttgagtcttttcaatttctgctttccacctcaagttattttctatttgggattatgttggatctgtgtattaatttgaggagaattgatgtttaacaagatttattcttcttatacacaaacatgctatatagctccacttattatttaggaaatctttaatttctcacgtcatagttttatagttttcaatgtttgaattttgctcacgttattaaatttttcctgaagtgtttttgtgataagtacttcataatacattattactatttttgctttaaccagtcaattatcttttaaacaattttaattgtgataaaatacacataaaaatattctgtgttaaccatttttaagtgtacaagtcagtaatgttacatatatcacattgttgtgcaaagaatatccagaatgtttttatcttgcaaaactgaaactctatacccttaaacaacaactcctgattttcctctccctttagcccatggcaatgaccattctaattttaatttctatacatttgactattttagatatctcatatgagtggaatcatacagtatttaccatggctggcttacttcactttgcataacgtccttaaggttcatccatgttgtagcatgtgacaggacttctttcctttgaaagactgaataatatcccattgtgtgtgaatatatatatatgtatgtatatatatatgtgtatatatatatgtatgtgtatatatatatgtatgtgtatatatatatgtatgtatatatatgtatgtatatatatgtatgtatatatatatgtatgtatatatatgtatgtgtatatatatgtatgtgtgtatatatatgtatgtgtatatatatatgtatgtgtgtgtatatatatatatatatatatatatataacattttatttgttcattcattcattgattgacatttgagttgcttatacctcttgacctttgtggataatgcttcaataaatgtgggtatgcaaatatcccttcaagatccttctttcaattcctatggataaatacctagaactgggattactggatcatagttgataattatcttttaaagacatttttaaaatagtaaaagaaaataaattgtaattatctacatctttagcatttttggcagcttttattcctttgtataaattctagttttcatctgatattattttccctctgcctgaagtagttcctctaataattctcattgtgtgtatctgctggcaatgaattccctaaacttttattgtctgaaatatttaattttgtatttatttttgaaatatacttttgtatagagaattctaggttgatgtgtctttattttcttcttagaatgagatatcagtggctattttgtttccctggttagctctataaaatgtggaagagtcctacacaagaatgtaagtaccagagaatgagatctttagaagtcatattggaggttggctacaaacaactatcttttggttcccaaagagccacatcctcaccatatgcaaaatacagttgtgccctgctaaagcctcccaaacgtttcatccattgcaacattagctcaaagtccagaatgtcactatataaatcagatctaagtgtggatgtgtcccttaagatgttactccttaagaacagctcctcttgtacagttcctctttatctgaactaaagagaagttacgtgagccaaatgtaccaaacatactgtggctggaaaggcacagaatatttgctattgatcctcctgttcaaaaaaaggtgaaattggaggcatatagggattactagttatagaatttctaaaatccagcatggcagtagttgactgctacttaagactcaaggcctgggaataatatgccatagctcttagatccacattcttggctcttggttggccttcggaatcatccttcctatgcagtaaaaggtttctcatattttcagcagagtagttttttctgcctgctttctgcttgtagaagtctgggagtccaaaagcctctattcgctttgtactgtttctgtgtctttcagtccacacaagcagtgtttgtcaataaacatcttaaatattttgttcattagataaaagccacatccaaaaatctctttgaattaggccattctctaccttgagcttctggtgagattgctgaaggacaatgcccttaagatttttagacttcctgttatctgactgaatggttcttcaagtcataatccttaggcttcctaaggtcttaataaagaattttacagttatactttggccttgtcttttgaccatattttattgagggtgtcctagctttggtctttacctggaagccttttcttcattttatcatcatttgtcctctggatattcatatgcagcaattccaggatcttttttgtttaatattgttttctttaaattatctttctcctctcacattttaattttagcagtaggaataaagaaggtaacactttccaaaagaatccagtgataccttcaagactatcaaataagattgtcacttaatattactatccaaaaacaatcagctataattattgcttaattaagggagaaccataatgctcaataataattttgatgaataaagtaaattgttgagcttagatagagatttttgaagggtttgttttgggatatactgatgacagaggcaggaaaaagttatctttaacattagcagcttgttttgtgctgattacaaaggactgatcattaaagtgaggtttcagtcagtggttaaacaggtttaaaacaagttctagaatatttgttattatagattttattttcaaactatgtaagctctaaagcctttcaaagtcatattgtcagtattctaacttccttattgttaacaatttgatttaaatccctttactatcgtactgtttctttttaaacgtttatcctttccttcatgcacccaggcaaatttctttaaattcataatatcattagactatttttattcacttttcccagttctttttttttcctaccactctttatgaaacaaacaaaatccatagtaggtctttcatttatttggtttcgagcagctcaatccatgatccttcttcttcagctctgaaataagtttagataggtctatgggtcaccagactatattttcaaagatgaacatcatgctacgacaatttgcttgagaataaaaatgtgattctattaatcacatacttctaaagttttcaatatggatataatacaggccagaaaaacaatacaaagagacaaaaacaggggtcaccaaactttctgtaaaaggccagatcataaatattttagacttataggccaagggaaaaaatctaggatattataaaagcacttatataacactaaataaaaatatttatgaattatttcattgatgaaatttaaaatataataatgatttagcaaacaattttgtaatgtaagtttactaatgggaggaattgagtttttttgttaggggagccaccacttcacttaactgagttttgatgttagtgtttctgccttgaaaattgattgcaaatgttcatctgttaatgcagatatgtaatgacattttatgtatttcatctttggaaagatcttttcagacagatagttactaccaaatacagatgtcaatccacaaacattattttaattgagcatattcatcatttggaatgcattcaaaaaattctattagattcttctcttaatatttaccttttagcatgtcattataattacttccaattgaagatgatatggaaattcctcaattgtacagctggagttggaagtatggaaattacctttgcacagatatttaaggtcagaaaaacactcctggaaatgtagattcagtttggaagttatacatgttgcaaatttttgtgtgcatggaggtctcacttttttttttttttttacttttggtaaatgtaaaaaacagctggacattattcgtgattcaaacaaagttagttgttattaaaataattgtaccacactataagtgtttcatagaaacactgtaattttagattgaattcattaagacacactatgaagtctgcagcaaaagctactctccaaagcatccagtatttgctaatggtggttaagggtggtcctcctcatttagaaatatttcaatctcaatcctcacctcaaaaattcacaataaaactttaccaccatgaaattatcaaactgatgtgtggtagggaaatcgggatattcggttcctgtttgtgacaaaagttcacagaaccgatgatggctatgaaagcaaatgaagttcacaattgaaactactagtcagtaacataggattgacttcaacatcttctgcaaattactggctgttgactaacacagtacacatccagagtctttaagtactatacattttcacaagctttgtaaaattttctttctccacatatatttttaccaatgttagtgggtaaaatttgcagattctgcttcagtttgtaccaagttaatgttttctcaaattatttgaaaatatcattgccagtatttgttccacatagactatttgtataggctgttctttagtcacctcaaagtcagcatgactcatccagtgaacaaggactggacggtgttcatagtctttgcccattcatcaagagccaaagaaagtcactcaaagtcatttacattgtttttaaactcagaattgatattgctcccagtgttcttcactctttgagcaaatgttctcacctaaagtctaatagtcttaatgtaaaaccatttaatggaaatgccattcttagctcccaggctgtacaataataggtgatctctaggcaaaaatatttaccaaagaaatctcttttgattaaaatgcagccaattaccaggttcacagtcctggaagaatatagtttagatcaatgtgactaatcttttttaaaaatagttacatctctttaaagaaagaaatacattcacaatctctgagaattgatttataatgttgttttcatgatgctatttatgtacagtaatcaagggaggcatacattcttacagttcttctataattatgaaatccaaaatttggctggaaattaaatggaaacaatatgacaaagccaatgatattcatataaaattaacttaaaagtgacagacgatttcttttcctgaaactaaaatgttgcttgttatgagagtataattctaactcctacagtatattaaaaaaatatttaacatgtcttcatttccatgataaacagattctcccaaggcccttctctcttttcagaaaacttaattcatatggtataacttgatataatttggcttttactttgtgtgaatgcatcagttaagtattatatgggtatctgttttctcatgagcttacacaagtaaggtggtatcattagagcttccatataaagaaatacagaccagaaaccagtattggtgcttatgcaactgatgatttttagatcatgatcaatatgataataaaacagttaacaatctaaaaacaatattcagagcacacagagtctctgatgaaaaactcatgtagattgcattagtgtcaattatacatagaacaatatagaccatcatttcaaaaggtagttatccatatttgatggtcagtttttccttgtattgaggtgactctgaaatagaccaattgcttggtaaatcaactattttattttattattttattttccataagttattggggtacgggtatatttggctacatgagtaagttcttcagtggagattcatgagatcctggtgcacccatcatccaagcagtatacactgcatcatatttgttgtcttttatcccttgctcccctcccactcttccccccaagttcccgaagtccattatatcatttttatgcctttgtgtcctcatagcttagctcccacatatcattgacaacatatgatctttggttttccattcttgagttacctcacttagaataatagtctccaatctcaaccaggtcattgcaaatgctattaattcattcctttttatggctgagtagtattccacagtttctttacccactccttgatcaataggcacttgggttggttccacgattttgcatttgtgaattgtgttgctataaacatgagtgtgcaagtatatttttcaaataatggcttcttttcctctgggtagatacccagtagtgggattgctggatcaaatggtagttctatttttagttctttaagaaatctccacactgttttctgtggtggctatactagcttacaatcccaccagcagtgtagaagtgttccctcatcactgcacccacgccaacatctcctatttttctattttttgattatggccatttttgcaggagtacgataattttttgactatgacttttttgcaggaatacagtggtatcactttgtggttttgatttgcatctccctgatcattagtgaagttgagcattttttcaaatgtttgttgaccgttagtttatcttcttttgagaattgtctattcatgtccttagcccactttttgatgggattgttttattcttattgatttgtttgagtttgtcgtagattctggatattagtcctttgtcagatgtatagattatgaagagtaaatcaactactgacccttatttaggcagtgtggtttatattctgaaaatgactcacagattttgaaaaaattacataaaatttttataattttataattttatttccgtcacactttctctgcatttttgccataaaattttcttaaactaaatgaatttgaataactgccctgtgatttacttaggaaaattgcttgtgtatctgtttcctcatttgtaaaataaaaataacaaaaccttgttcttaagattgtttaaaggactcagtgagaaacatttgaaagtccctataatctggcagatgtcagaaatatgagtttccttcctttcttgacaccagtgagtgtaacagaaaagtaatagaaataatgctttagttaattttggttagaaataaccatgacttttgtctctacagatccttgaatagatgagttttaaagtctgattcattctttaaagtctttattaattcaatggcataataaaaacctcacagatagaagccatctttttatatctcgcattttgataccgtatcaaaccattttccaggtaccatttaactcactcaattgagaaagactgcatgcctagattgctgaagacttttattcctttcacaatcagttaacattgggaagaagtgcttcgcaatagtatacatgatgtagtgtaaggtagaatagcacttaaccatggcataaattcaattataatgtgtcttatattataaggtataactaggcaaaaattagattctaattttagtttatataattactgtgataaaagatgtattataatgtttaagtactgagattttttttctgggtttttgcattccgattctctattatagttttttcttcccgtggtggttttctgtcctatcctccctttataaagttgcaatacacattttaaaatgcaatttctgcatagttccattttctatgaaagagcaaacagttcagctaggaaaagagaacaatatcagcctttagatagtgtgggcaaaactgagagtcacttccctttcagctcagctttgatttcaagttacttaaactctacctgaaaacgcttttgtgtcatatacttgtacgatgtaaatatcatccaaattaaaaatgttaaagcctcaatgtcttctttaagtatttatgaaaataaaacaagaaactatttctgattatattatcaatattgaaaaggaatggtcagtaaatatatgacattttatagtctttgatcaagaaaagaggaaggtaatttgaaagtgtttgtgttgtatttctaaccttatctgctggaatttatgtgttatctgttggaattgccagcacatataaggctatatgttttaaatagctgatttgttaaagagccatcgaaaatatgagtttgaaaataacaaaggaatttaatactacttaataaatattttagggttaaaaataagtgttacattttctttagtggcatatttaaaaagtttcatctcttatttatatctcacagtttcaacactttactgcaaactttaaatactcatggcaggaacttagcatgaacaaaacagtttgcatgtccttatttccatgataaacaaattttcccaaggcccttctctcttttcacaaaacttaattcatagggtataacttgatatcatttggcttgatatcatgttctatgtttatcttttgtgaagttccagtcatatctgagtaaacattttctctctttttaaaaccatttgacagaattaaatgcactgggtttttattccttcaatgtgttatcacaatctttttttaaaaacttattcgatatctaagatctgatgtactttaagaagttcttttatttgtgtttttggtcatctgtttgtgtgtgtgcatgtgttttgtttggttgtttgttttagcaaaacctaaaaacttctttgactaaaagaaacttgccttgacaataaataaaagattatttagctcttattcaaattttaaaaaacaagttttgaagtcagtcctttttattctgttatttggtaattatagtaatacattaaattaattcagtctttatttagattttagaggactcttagaagtattccttttttaaaacatgcacactttttatggtcattatggctattttgtaataaagaaatgaaagtgtgacttgtttgtagttacatagtcctgattagtggaaaaccggtcctccgattctcaaatcacctctttccacaagacttcactgccacgtctgacctccaacttgtttttgttgcaaaatttccttttcatgtcgccgggtaagcaagggtaacatagctctctgtgtttttgcagcttagggaagtgaaatgaaggggtcatcagagtcaagatgacagtgggatacttagtgctttcctcatcaggctgcaggttagccctttcagccctgctgcctttgaaaacacacttgaaagtaaccccttccactccaagtgttcaaagatgagcaaatcttgtggcgtttactaaacataaagagtcatcagctttacatggtcagtttgcaaagagaaaagggtgtgtaagagaaaagagtgtgtgttaatgtgtctcttatggctttgagaatgtggtgaaaaagaaaacatgtaatcacaagtaattaataaatatctatgcagataaaggagataacaaatggataagggggtgattagtggttaccctgttttcttttgtctcaattattaaaaaaagtttttttcataaataaatggaagagcatattaaaatttctccacaattattttcaaccctcaaactgtattgttaggaaagtatttttataaaaccagtaaaggcactagaacttgtttacagaactaacctatttagaatgaatactacaaaaacatgcaaaagaaatgtgtattgttctgaaactaaagctcaggaacaatataaatgaagaaacatcaaagtaagaaatgttatctcaaccaaatatgagtcacttaccataactttgcctattggattttaaaactagggttctctcacgtgtgggtagcaatttagaaagcagcactgtgtcccaaaagatttcctttccagaaaaatatcattaaaatatgtcttcctagtagaatccctgctaataagattagaatacaccagataattgtagtaactaataaagtcatgttttatatggatactagcagatttcagtaactaaagactcatgtgcaataaatatcctaggcaattgaagtcttgtaactgtaaactcatgcatcttttcaaagaaaattctagcgtaaagtattgattttataaacaataacatctttatacacattcatggcattgcaattcaattttttccatatgtaatattttatttgctgaactgtcagagtttaagtgctgtgcaaagcagacattttctgaaattcactttacaatttaagataaacttcactcctcttcttccccactcttgtatccatctatttttgtccaaatcattcaaataaaaactatttagactgaactaaagttaaagaataaaggaagaatgggtatggttgacaaaggcagcctctgtcccattatcattattcctctaagtcagctttttgtactatcctttactcagattccaaaagtacaattcctggatcctatgttggttacaggtttagttccattaacaactgccaaactgttttaaagagtgtttgtgtgttttttacattcccatcagcaatgtatgagtgatcctgcttcttcgcatgcttgttaatatttgatgtcaccattttttattttagtcattctgagaggtatgtactgatatttcactttgattttaatttttatttccctaattgctaatgatgttttcctatacttatttgctctctctacatgggatatacatacgtatctatatattcatatctgttatctgttttctgattgggttgttttgttactgttgagtttgagagttgtttatatatcctagatactaaacctttattggataagcagtttgcaaatacttttgcccaactgtagcttgtcttttcgttctaacaaagtttcttaacataggaaatgtttttaattacaatttggtctaattttgtttttatctttcatttttaagttcagggatacatgtgcaagtttgttacataggtaaagttgtgtcatggggatttgttgcacagtttatttcatcacccaggtattaagcccagtacacattagttatttctcgtgatcttcttcctcctttcacccttcaccctccaatagaccccactgtgtgttgttctccactatgcatccatgtgttctcatcatttagctcccacttataagttagaacattcagtatttggttttctgttcctgtgttagtttgctaaggacaatggcctccagctccatccatgtttctgcaaaggaaatgactttgttctcttttgtggctgcataatattccatagtgtacatgtaccatatttttctactgcaaaaatgttctcccattctgtaggttgcctgttcactctggtgacagtatttttgctgtgcagaagctctttagtttaattagatctcatttgtcttttgttgccattgcttttggtgttttagtaatgaagtctttgcccatgcctatgtcctgaatggtattgcctaggttttcttctagggtttttctggttttaggtcttacatttaaggctttaatccatcttgagttagtttttgtataaggtgtaagaaaggggtccagtttcagctttctgcatatggctagccagttttcccaaaaccatttattaaatagggaatcctttccccattgcttgtttttgtcaggtttgtcaaagatcaaatgagtgtagatgtgtggcattatttctgaggcctctgttctgttccattggtctatatgtctgttttggtaccagtaccatgctgttttggttactgtagccttgtagtatagtttgaagtcaggtagtgtgttgcctcctgctttgttctttttgcttagaattgtcttggctattcgggctattttttggctccatatgaaatttaaagtagtttttctaattctgtgaagaaagtcaatggtagcttaatggggatagcattgaatctataaattactttgggcagtatggccattttcatgatattgattcttcctatccttgagcatggaatgtttttccatttgcttgtgtcctctcttatttccttgagcagtggtttgtagttctccttgaagaggtccttcacatcccttataagttggattcctaggtattttattctctttgtagcaattgtcaatgggagttcactcatgatttggctctgtttgtctattattggcatataggaattcttgtgatttttgcacattgattttatattctgagactttgctgaaattgattatcagcttaatgagtttttgcgctgagacaatggggtttttaaactatacaatcatgtcatctgcaaacagagataatttgactccctctcctcctatttgaataccttcatttctttctcttgcctgattgccctggccagaacttccattactatgttgaatgggagtggtgagagagggcatccttgtcttgtgctgcttttcaaagggaatgcttccaacttttgcccattcagtatgatattggctgtgagtttgtcatagatagctcttattattttgagatatgttccatcaatacctagtttattgagtgtttttagcatgaaggagtgttgaattttgtcgaaggtattttctgcatctattgagataatcatgtggtttttgtcattggttctgtttaggtctctaaggggtccagtttcaatttgcatatgttgaaccagccttgcatcccaaggatttgcatatgtcaaaccacctttgcatcccagggatgaagccaacttgatcgtggtggataaactttctgatgtgctgctggatttggtttgccagtattttattgagaatttttgcgtcaatgttcatcagagatattggcctgaaattttctttttttgttgtgtctctgcccagtttgggtatcaggatgatgctggcctcataaaatgagttagagaggagtctctctttttctattgtttggaatagtttcagaaggaatggtaccatttcctctttgtacctctggtagaatttggctgtgaatcaatctggtcctgggcattttttggttggtaggttattaattactgcctcaatttcagaacttgttatttgtctattcagggattcaacttcttccttgtttagtcttgggagggtgtatgtgtccaggaatttatccatttcttctagattttctagtttattttcatagaggtgtttatagtattctctgatggtggtttgtgtttctgtggggtcagtggtgatgtccccttcattattttttattgtgtctatttgattcttctctcttttcttctttgttagtctggctaggggtctatctattttgttgatcttttcaaaaaaccagctcctggattcattgatttttttgaagggttttttgtgtctctatctccttcagttctgctctgatcctggttatttcttgtcttctgccagcttttgaatgtgtttgctcttccttctctagttcttttagttgtgatgttagggtgtcaattttagatctttcctgctttctcctgtgggcatttagtactataaatttcctcctgaacgctgctttagctgtgtcccagagattctggcatgttatgtctttgttctcattggtttcaaagaacttatttatttctgccttaatttcattatttaccccgtagtcattcaaaagcaggttgttcagtttccatgtatttgtgcggttttgagtttcttaatcctgagttccaatttgatctcactgtggtttgagatgatgtttgttatgatttctattcttttatatttgctgaggagtgttttactttcaattatgtggtcagttttagaataagtgcgatgtggtgctgaaaagaatgtatattctgttgatttggggtggagagttctgtagatgtctattgtacacacttggtccagagctgtgttcaagtcctgaataaccttgtcaattttctgtctccttgatctaatattgacagtggggtgttaaagtctcccactattattgtgtgggagtctaagcctctttgtaggtctctaagaacttgctttattaaaaatagtcattctgactgatgtggggtagtatctcattgtggttttgctgtgcatttctctaatgatcagtgaagctgagcttttttttcatatgattgctgattgcacgttttgtcttcttttgaaaagtgtctgttcatatcctttgcccactttttaatggggttgtttgtttgttttttcttgtaaatttgtttaagtttcctatagaggccgggtattagacctttgtcagatgcagtttgcaaaaactttttcccattctgtatgttgtctgtccactctcttgagagtttcctttgctctgaagaagctctgtaatttaattagatcccatttgtcaattttttctgttgtggtaatttcttttggtgtattcgtcatgaaatcattgctgattcctatgtccagaatggtattgccaaggttatcttgcagggtttttatagctttgggatttacctttacatcttttaaaccatcttgagtttatttttgtatatggtgtaaataagggtccagtttcaatcttctgcatatgttcatgtctcccacgattattgtgtgggaatctacatttcttcgaaggtctttatgaccttgctttgtgaatctgggtgctcccattttgggtgaatatatatttagagtagttagatttattttgttgttaaattgaactctttaccattatgtaatgcccttctttatcttttcttattttgttgatttaaagtctgttttgacagaaactaggatttcaacccctgctttttaaattttccatttgcttggtagatttttctccattttttaaattttgagcctatgtgtgtcattgcatatgagataggtctcttgaagacagcatatcaatgggtcttggttctttctccaacttgccactctgtgtcttttaactgggggcatttagcccatttacatttaaggtaactattgatatgtgtggatttgatcctgtcatcgtaatattagccgtttattttgaagacttgtttatgtggtttctttatagtgtcactggtcagtgtacttcagtgtgtttttgtagtggctggtaatggtctttcctttccataggtgcttccttcaggagttcttgtaaggcaggtctggtgctaacaaagtccctcagcatttgcttgcctgaaaatgatcttacttctcatttgcttatgaagcttagtttggctggatataaaattctgggttggaatttattttaagaatgttggatattggccccctgtctcttctggcttgtagggtttcagctgagaggtccagtgttagtctgatggacttccctttgtaggtgacctgtactttctctctagcttcctttaacattttttcttccactttgaccttggagagaatctgatgattatgtgtcttgggaacgattctggtgcctggctggaattccaagccaatgggtcttaccctgtgaggtcccatggaagtgggccctgcaggctgttgctactcagccccctggattcagcctctatcttgagagcatgtatgggggtctaccatcctgctttggtgaagttgccactagtttagctgggaagcatggaaaaccagagtatctaaagctcctgggtctcttcacatgcctgagtggctgctctgttgagactccatgtagctctgcgtgtccgactgaaggcttgggttcatgaggggctctccagaccggacagttgcaaagatccattggagaaacatgggttcctgaggatgcacattcacccaccacctccctgggtgggggaggtccccttggttttgtgtcactctcaggtgggccattgtcctgccttgcttttctccactctctgtaggtgtagtcatttccttgattagtcccaatgtgagtacctgaatgtctcagttcaagattctgtattttacttacttgccccttctgttcctctccatgagagctgtacacattagctgcttgtagtcagtcaccccaatttcttaatttttctatttatggatcattcttttggtatcaagtctaagaactctttgtctaattctggatcctaaagattttcttttattttatgaaagttctataattttacatttaagttcctgatccattttaacttaatctttgtataaggtgtgagatttaagataaagtttaattttttttcctatggctgcccaatgttctagcaccattgtcaaaaatgcttcctccattgaattgtttttgcaccttttcataaagtcagttgggcgtatttgtgtgagtctatttctggattctcttttgtattcctctttatctctcaaccaatattatacactctcttgattactatagctatacggtaggcattaatatcaggtagacttactcatcatattttattcctttcttattattgttttagctattctaggctgcatgtgcctgtccatataattcttttttttttttgagatggagtcttgcttcacacatgttggagtgccatggagtaatcttggttcactgcaacctccgcctcctgggtttaagcgattcttctgtctcagccttctgagtagctagaattacaggtgcccatcaccacgcctggctaatacttgtatttttagtagagaccaggttttgccatgttggccagcctgatcttgaactcctgacctcaggtgatctgactgcctcagcctcccaaagcattggaattacaggtgtgagctgccatgcctggccccatataaattttagaataagcttgtctatgtctacaaaaggcattactgagattttgatagaaattacattaacctatggatcaacttgagcccattgattttgttttttactttttaaagaacagtttcaaggagatataattcatgtaatatacagtttgcccctttaaagtgtacaattacatatattttcgtgtagtcatagagttgtgcaccatcaccacagtcaattttagaacatttttattgtcccccaaagaaaccctgaactgaccagtagtcatttcccattccctacccacaatcccctcagacctaggtaaccactcatatactatctttctctagtttatctgttttggaaatgtaatataaacagaatcaaacaatatgcagtccttgtcactagctgctttaacttagcatgatattttcaaggttcatccatgttttacaatatttccctttttatgactgaataatgttccattgcatgtgtggtggttaatactaagtgtcaactcgattggattgaaggatgcaaagtattgatcctgggtatgtctgcgagagaggtgccaaaggagattatcatttgtgtcagtgagctgggaaaaaggcagatccacccttaatctgggtgggcaccatctaatcagctgccagtgtggctagaatataaaacaggtagaaaaacttgaaaagactagactggcctagtctgccagcctacatctttctcctgtgctggatgcttcctgcccttgaatgtaggactccaggttcttcagttttgggacttgaactggatgtccttgctcctcagcttgcagatggcctactgtgggacattatgatcatgtgagttaatacttaataaactcatatatatatatatatatatgtcctattagttctgttcctctaaagaaccctgactaatacatcatggatatactatatctttttatccatttataagctgatagacattgagttgtttctgtattttggctcttacaaataattctgctgtgaacatttgtgtggacatgtttttatttctcttggatatatacctatgagtaaaattactgggtcatatgggaactctatattttacatttcaaggaactgccaaacaattggctgtaccattttacattccaactagcagtttccgagtgttcctgcttctccacatcttaataaatattattatctgtcttttttattatattaatggctattctagttagtgtgaaatgtatctcattatgcttttgatttgcatatatctaatggcttattatgtttagcattttttcatgtgcttattggtcattagtatatcttctttggaaaattgtctgtttaatcctttgcccattttttgcttggggtacttgtctttttattattgagttataaaacttctttatatatgttgaacttaattctcttatcatatatatgatttgcaaatatttcatttcattctgtaggttgtctttttactctcttaatgatgtagtgtgcagcacaaaaggttttaattgttataaagtccagtttatctgatttgtcctctatctcttgggcttttggcattgtatctctaattaggtttcgactaatccaaaatcatgatgcatcctatgacttcttctaagagttttatagtttttatttttaaacctaggtctattgtctgttttaagttattttttatgtatggtgtaaaaaaatttcaactctgtgtatcttgcatgtggatatccaggtgtcccagcaccatttgttgaaaatactttcctttctctattgaatgttattgacacccttgttggaatcaactgaccataaatgtaagagtttatttcttgattctcaatttaattccattgacttttatgtgaatcttgaagccagtactgtagtgttatgattagtgtagctttgtagaaagttttaaaattagaaaatgtgattttttccaactctattctttttcaagattattttatatattctggattccatgcagttccacatgaattttatgatcagcttgtcaaattataaaaagaaaaatagctgggatgttggtagggattgtgttgaatctgtagatgaacttttagagtatttccatcttaacaatattatgtgtatcaattgatttttgacaaatatgccaagataattaaactgggaaagtctggtctttttaatatatggtgttgtaccacagacttaaataccatagctaaaactattctacctctagattaaaacacaggagaaaatcttcatgaccttgagttaaccaaagacttcctagatataacatcaggaatataattcataataaaaaatttgatagcttggtcttgaacaaaattaaaaacttttgatctttaaattataccattaaggaaggaataagaaaagtgacagttttggaaaaattatatctgaacttttacaactcaataatataataaaacacccaataaaaatccttggtaaaatatttgagtagatattttaccaaagaagatatgaaaacattaagtaaggaaagaaaagcagtcccaggcttccaaagattggagagagtgggtaaatggatttatggggaaactaacgaagttaagtctgtttgcagattcctctggtgcccctctctgagcctgtaagcattgtctgcagtaaaggaaaatttacattctgtccttaggtaggaaagggggagagaatagaaagaccttttatcgttgtaactttctgcccaacatttaggctaacagagggaaggctaagagatccccctgcatcttgtcttcagctcaactatttttcatattctagcttccttcaatattatagcagcatttcttcatactatccatcaaataaaaaaacccaaatgtccaacaattattgtatggataaataaaatgtaatatatcaatacagtggtatttcattatttgccaataaaaaggaatacatacaacaacctcaaaaacaatatgcttagtgaaagaagctgagcacaaaagactacttactgtgtaatttcatttttctgaaattccagaaaaagcaaaactatagagacagaatcagattggtttcagcctggaactaaggcaagagcatggattaattgtattctggcatgagggacaattttgggttaatagaatggttccaaaactggattgtgatgataattgcacatctatataaatttaataaaattaaacctcaaaacaataaagaacggaaatattacagaactatagcttacaatttataggaatttcaagtaagctgtttatttgctgatatcagtaagcagatcttccttttggatgtctctgtctctgtctctctctctctctctgttttacctcctgaactttgctagcacgtggggagtattctgttctttatctgcttctttatctgttttcacttatggattctgggttttcatttagtatccctgaatcaaaaggaagtctagttcctttttattgactgttgtttaattatctcactattttgtgttttagtcatttactatacttcaattgatcctctatctgtatgttcttgggagactcttccccgtgagttcttataacaaagattagtttaatattagtgtttaagcaatgttcaacacagctgtagcctagccccttaaatatatcctgatacacacacacacacacacacacacacgcacacacacacactcatatatatatatatatatatatatatatatatattctatttttttaatgatgagcatggtttgagaggtaagtgtaatgtgtatgttaagatcaggttataaaggccgattttcatagatgagtgttatgttttggatttcagctgtacttcttctccaaatacctgccactatagtcactattcaagtgcccatctcttttggaacatgcctcctgggcacatattttgccacaggctttgcttaaaactacagctcaataaaatttcttataactacagaacattcagttctgttggcaacagttattttccacctattttgtattgcttgtgactgagttccagcaaatcgcttcacatttttttctctgttgttatacttacccatttttattctcaatgctagatgtgatatttatcttactgccaacattttatacgtccaactccatagttttaagttgttttcagacgagcagctacttagtaatagtagaccaataatgacaatattcacagatactcagaaggagctgcagactgacatttttcttctcaataagcattaaaaaagcacatatgtaaactatacgtcttttattgtagtcttatgatttaagataaattcataaaataatttaaacatcttagctgatttccactttaattttatgtttcattttggaggttagtccttaaaatgctaactttacatggcaggagagtgccatggctgtggcttaaggcaatggcaagattccagacggtggctcctggttatagattatttgctgtatctaggatgatcatgatagtgaatattatgatgatgataaggaatatgacagtgatgatgaagatggtttttgctgtcagagagtggtgatattcttgactgccatcttgaaaactcctcttcggaattaatgaggccagaaaaatatgctgctaatatatgtataaattaggcactcgtcaccagaataatgaaatgtatgctatatattttaggtttattgctttgaatggtaacattttagttctgtctttatatatgtctctgtataataaaattagctacattaaatttttgccaggcaattaagtcaatgaacactgctatcctactggctttgaaatgaaggcacaccccttcagagtgtaccctatcagaaagaaagaagaggaaaaaaaattataattattaattcatgatgctatgcaggtaaattctctaccttatcattctgccacccaacacttgacttagggtttgagcgtcatgacagatggtttctgttgatggtacagtgattcaggcaccttatttttctcccttaaatcactttgggttgtgaatactataaaaacttcagtgtttgcttgatgaagagaaaatatatattacaatgaaaatttccaagatatggcatttcttacatgtgattctttttttttttttttttttttttttgagacggagtctcgctctgtcgcccaggctggagtgcagtggctccatctcggctcactgcaagctccgcctcccgggttcacaccattctcctgcctcagcgtcccgagtagctgggactacaggcgcctgccacctcgccctgctaattttttgtatttttagtatagacggggtttcaaccgtgttagccaggatggtctcgatctcctgacctcgtgatccacccgcctcggcctcccaaagtgctgggattacaggcgtgagccaccgcacacggccccatgtgattcttacatgtaacaagttgttgagtattttggactcttgttaatagttactcactgaaatacatgagctgtttttaactaagctcgaaaaggtaatccattatatttaatatgcgaagattgattgtggtggaacatattatgagattttgttttgttttgtttttgaaaaagaaatattgaatagaaccatagattttttactctgcttttaaaaggtatgatttttgactaaaaacaaatgttctcaacatattcccttcccttccctatgatggtgaatgtgttggccagttgaggtgggactaagatttgggtcccaaaactaatgagcttgattcttgtgtttattcacagtaaatgatgttgacaatggccatacatcataaaacaggctagattaacaaaataaagttacagtgaaaaaatactaacccatatagtggataattattatagaaaagtctttctacttaacaataacaatgaaaaatctaccctttttcttgtattctgatcacgaatacttcattattgtgctatcatattaggtgggggtataacttgagtcccataaatgcatacttatttccttaacaagctgttgctatgagaaaggcttaaaccagtaaattaccttagatgatgaggctttatgaaatcacaaatacctagtaattaattttgaacaatcacaaattttttataactttaatattgtgacattgtaaaaataaatattcattgtagaatatttagaaaatgaaattaggcaaaataaaaatccctaaaaatcacttataatcctattacctagagacaaccactatcaaccatgccttctatattattaaagtttaaaagtaggcacctaatctcctctaacaaaactggaattgtagtgtatgtgttattttatatccttcttagaaaacaaaaatcaaactttcattaaattcagttatcttcaaaagtcgtttacttgtgggtgcagatgtgagtgtggtaacctctctgatttttctggcttttgccttcaccttctggatagaacttcaagtcctgttcaaatggtgacaaagttatgtctgagaatagtctaatcgttacttcattagttctcagtacgttcttttgtgttccctgccacgtagtccttggtgtcaccatatcctactggtgctaccacatcccaccagattgtgatggaatgttgctgtgcccaccaggcttcattgccccactgggcattaccactaacatcctgggaactcatggggcaaattatgcaggccatttaatggcacagtggaaaagcctgcctttgccctctttgtgttatagcatgttagaagaatgctaaaagaatacttttatacccaatgttacaaaaaggaaatagtaaaacagtccagagtaaacacattgaataaaatgaagccacttaaactgatacttacaaggactatgttttatataatattaacaaggcaaaccatgtgtatcatcaggctttgtgaggttggaggtaactgctattgaagaaatgcttcaggccctggtcaacacaacgaaagacaatgaacagaaatcgccatttgatgtgaagagtgactgtaaaggaagacaagaagaaggcacaaggagatttgctccaaactagttcttcccataaaatctctgccccggccagttgcagtggctcacgtctgtaatcccagcactttgagaggccgaggtgggtggatcacctgaggtcaggagtttgagaccagcctggccaatatggtgaaatcccatctctactaaaaatacaaaaattagctgggcgtggcggcgggcgcttgtaatcctagctactctggaggctgaggcaggagaattgcttgaacacaggaggcgggaggttgcagtgagctgagatcgcgccattgcactccagcctgggcaacaagagcgaaactctgtctcaaaaaaaaaaaaaaaaaaatctctgccccatcctccaacattgagtagcccctgtgtctctgaccactcccttgtcctcttgaccttttttgaatttctgttgatgcattgagaattttaggagagacttcagattgtcctacaatttactttgattaatgcagaccttaaaccttgcagttcacattaaatggtatttttttccaggtgttttccacagatctttgctaaagcctttatatagtgacattatcctcccagatcaggttcctgatgataagtattattgagtttcttttttttttttaatttttgtgagcacatagtaggtatatatatttatggggtatatgggatgttttgatacacgcatacaatgtgtaataatcacatcagagtgaatgatgtatccatcacctcaagcatttatcttttgtgttgtaaacaatacattacactcttttagttattttaaaatttttggtttaacaatacatttctatggcttttctctgagattggtgcatcagtaggttgggcatgtgttaggaagcattctgagagacactgattattatcaagcaagtttagaaaacattgtctcacaattctcattaccttcccttttcttgtagacctcaatttacagctctgggctttagaaccatctggacctcactcccagaaatgctagtttaattggtctgtgtaagggcctatgtggcagtgataattctaatgctcagggttgacaactactatcttaggcaaaaaatcagatgcttttgtaatcacagcaattgttctactatgagtatcctttgaagtatctaatattcatttttcagactgttaagattacctttagaaatgaaatttgttgggtgaatttgaagctttttaaaatcatttttcatgcatttttgaaataaattgctgtttttctttcctcatgcctaaatatgttggatttcaaactatctttgcttatctgctgtgcttccagctttttataggaaaattggttatgtttgcttattgtgctgttagatgggaaattatgtgattagattcattttaggatttttaggatgaaaacatgtctgaaatagctgttatttaggttgcagcagcaggcataacttaaaacatgcaaaaccacaatgaggtgatttgaggactgatttttttccacttgctgttgttgggatcaagtcaaaatttgtcagtcattgaatgggccctgtggacatatttgctctggcattgctaaccaagtgaagtctactagtttgagcaaaaagctcactacatttattcttactggttgacagttttatttgtggtctctgtttaaaatggagaaattgagcccagcccttaaacttttggctttggcaaaactgctttggacaacatacagaaagctaaagaaggagcagctgaaattttttccttaataaacctttcctttataaagttggcaaactgtagactactaaatggacaagtttaagcatgttgttcgatgccagcatgacctagaatttctttaccggtaagcacactagctccttgtcacagacagtgttggtacttttcagccacatattccagaaaaagtccttacacttttgaagttttataaatatcaatttgtggccttggcgcacgttagaggagcaacgtgtggctttgtaagtgcttaacagctatttgcaagctgttttcttcttggtgcaacttagaataatcaatcagcagttagaaaatgttaaataataatctcaaagtgaacaacttgtatttctaacaatgagaaggttttctctaatttttactacttttcatctctgcatttctggcgtatgaacaccaaggtaaaaatggtttcagtaaaaaagacaaaaatgttaagtcacgaactgaaagttttttcagaaaggaagtgggagccaatggaatggcagtagagaagtaataaatatttcattcaattaagcataatttttatgacttttcaaaacataaagggagagttggggaaaggaatttatgagtgagacttataaactgtcctattttcttttaggaatttgaaaggtgttgatttttggtaagattttataagattttataaatacaagattgacctcatttcaccaatacctattgagcaatactttctgtatttccagaccagtccaagaagattgtatataagagacacctgataatttcaaaatcctaggcccacttcctgagctgagcaaggtaaattgtggactttttagacctccactttacacagacaccctctgtgttctatcagactctatcttatgaataacttttgaaaaaatatgtggtcttgataagattaattcaatgctttactgatattgataatgtatctatttactctgagccaagcactgttctgagcgctggggattcagaccaaatcaatgaaactcactttcttgtgaagattatgtttaatagggaaatagagtgacaacacctaacaaatataatatattcatcaagtatagtaaataaaaaatataggagttgcaacattagaatttagcaacattagaagttgctaaatgttatagaacagaaattgtgcagaaacaagggtgattaagaatgcaaaaatggtggtagttctcaatgttcaatagagtgctcaagagtaggggtcttttaaagagcaaaatatggcaaagactagaagaaggggaatgagagagccgtctggatatctagggatgctgtgttttagacagaggaaaaagccatacttgaggtatgaaactgcaagttccaagtttcaatggcatgaaaggaaatcaagggcttaaaaagcagctggttttatgtctagctgggtcttagaggacaagtggagaaggataggcagaagccagatgattgaacactgtgtatgctctgttaaattgtttacaccttatcctatagaggtcagtttatctttcacacaggatagattcatagataaggtactctatctgctgaagaccttaggatataggagattatcaataaatgtctaatgaattataacatgcttgattttaaaaaaagcttctagtagtataatagtggcaagaattataagaaatagttctttttcacaaaaaattatatgagtaaattttatctgtaatagtttcctattgccgccataacaaattaccacattagtgacaacacaaatttatgatctcacagttgtataggccacatggccaggattgcttaacagatttctttgttccagctctcacaaggctgggatcaagatgtcagtggtctggactgttatctggggaagaactggcttctaggttctttcaggttgttgacagagtctagttccctggttttaggactaaggtctccatttccttgctggttgtcgctggggtttgctcttatctcctagaggcccttcttaggcccttgcatgagggcgcctgtatctcagaaccagcaacaacttgaaatcaaatccttcttgggattagatttgttctgactttctcttttcttcctctttccccattgctccatctctttaaactgattctctgcctttcttttctgattttaaaggaccatggaatttcactgagcctaccagataatccaggataagctccctatttaaggtgattagtaactgtgatgttgtgaaatacatatttggtctttgtcctatttcctggcatacagctcctaaaatccttagaatcctccagagtagtaagagtgtcctttttatgctaatgagacgcctggtggctggggccatctagattgcctcatgactggggctggtcataagaaagaccaagccatgactatggggttggaactttaatcccatccccaacctccaggttggaagagaagataaaggataaattgatcactaatggtcagtggtttaatcaatcgcacctatgtaatgaaacttccattgaaaactccaaaggactgagttctgatggcttggggatagctgagcatttggaggatttgggagggtggtgcacccatggagggcatggaagctccgtgccccttcccaaatgcctcaccttatgcatcccctgcatctggctgttcatcatattctttgtcatattctatttgatattattgtaattttatattatataatattgcaatagcatattataatattacaatattatttgaaatattctttataataaaccagtgtatttgtgtcccagagtactgtcagttgctgtagtatattaatagaatccaagaaagcagttgtgggaagctagttcgtcagaagcaaaggtaaaacaacctgaggcttgtgatcggcatgaaaggtagcggcagtcttatgggactgagtcctcaacctgtgagatctcatgttgcttccaggtagatagtgtcagaattgatttagaggacacccagctagtgtctgctggagattcatctgtggaattgcttggtgtatgtgggaagtccccccgccccttgccccgtcgcattggtgtcggaagtattgaatgagtgaatgataataggaaaaacacttcagatttctgcattcttacagtaaccttaattgtatctgctaacagtgcctagattcattttgaataactagaggatggggatcttgtgggagacatctttagaattgttgcctaccacagtgccatgtcttgggatgactcatgctcaaataatgatgtttttttttttttttttttttttttttttttttctacagcaggatacagtagaagggagctaggtggtagcacagaacctattctctggggaagaactgacataggagacgtgactaagttgcagttgacagtaagggggtggtgaattggggggctcaatttttgaggagagttgcagtctaattttcaaggcagaaaaaagtcatttccagttaagtccatagtgagtaaacaagaaagcaggggatacagagagccaagtggacggtgattatcattcatagaattgatctgtctgtaggcgtaggtctcctttgctgggtgggttcaggacagggcttcggtcttcaggtggtgaaagacgatggggtgatcatggggttttaggcagaggacaggtcaaaactaacttatagggttaaaataaaacaaaaagacaaagaaagcaaatgtggaacaagggcaatttagggacaagagccagctgcatgcaatccttgatgatgacaatttctggcactgacttgatgtaaatcatttttacaaagaagcctaatggtttatcaatagtgctgtataaatacaaatgtctagtctaaatccttctgcctttagagcatgtcccatttctcctcttgtaaatgcagtggcatagctgacaatatataacaagagtcggtagcttactatgtttcagaggtggaagcgggcaacattcctcaatcggcttttcctttgttctatagattaaatatatatatattttttgccagttggtttacttttagcacatgttacaaagaactttagagaagagagacaaaatgtgaacgcaaatagacatttacaaagattgaaaataaccttttttcccttttcctagttttaaatactttaaaagatttgtttttggtctgagaaaaagagaatatttcttggtaacctagaagggttcttggatctgaaaggagaaccttaattaatcctttggggaagacatcattgagacctagggaagcaaagtgaagattttcagagtgtttttagagctctttcccaggctacatttgctggactctgcctgttgtcttgtggccaaagaccttcatgccagatagccatttgctattagatgtgagtgtatgtgtgtctggttggggagaagttgggggaaaatgtagtaattattgactagcattactctggttttagtcaacttgcacctctataataagcaactttctgcttcacatttttcctccatctagctgacctggctaaaactgaacctagcagatgattgaccatggcattagccgacaccatactgcctccagcttcctgtcttgggtttcctctcctgggtttgttatatttcaagtctggttcttctccaaccagttcactatcccaaagattgctttagttatgacatgagtgggctatatgtgagttaagtgtcagaaagatgagaaattcttccctttattcattcactgatagtctttgcaagttacataaccatctgtatttgaatctatatatttgttccacgaaaagggaaaataaatgctttaattggtatgaactaatcttttagatcatcatgcagatacaaaatgctgtgcattttgctacagattatcgatgtttttgctaagacaaacacaatggctatgattagtgtagcaggtatttgaaatagaacacaaacaataggaaaaaggcaatgatttataagacactgaaggggaagtgggatctcatcattgtctcaggacatgatcgggattcctggagagtgtgtggtacatgatggccagttatctggctcgggttgtttttgctaatctgactcccacacttggactctgtatagatttcaatgaagaacagcttcatctatcattgggaactactgtgtattctttttgggggaatgatgggtgaagcaatattaaggtcatgtagaggaaaagtatctccttttctctttgttcagttatcatcatcatcatcatcatccaccacattgtgaattacaagtggtgaggagtgtgcctacagtttgaataatggcatgatcaattccctttactttttcctctcaaagtctctatatactccttgtgtagggatagaacagaacctagattacttgactatagaagctttcatacctatagaactttttgtagagagaatggtgtattcaggggagagccagcattcaactaaggtaaaaagagagtttatgccaagtatttcaacatgcgggagggttttattttagatgaaaaaggcaaggaagcatacttgcaagagaatgcatctataatatttggaaaggcagagataggatatgccagatgtgagggagtgggtttgggtcaaaagtatatgtagctgaagaaggttgtcttctgttatatgataaagtcctcaggaataagaattatatttgggatgaccgtggcatgctacaaaataattttagtgttaaatatttgcccaacattggcaagtaaatgatgacatgtattatatcataacttgacagaaaacagtttgaaagaaggatgttttaatatggtatttttctatgtttgaagattggggcaaatgatttaaaattctgcttttgagagttcttaatttagaaaaataagttactgtgctataggagtttatttttattcactttggaatttatattttaattcactttgggattcacatttacttaaaataacttcttgacattcatttgaaacatgaaatgtaataaataattaaaatttcaagagaggatttgataagtaagcttatattccagctctaaaaaattctagtattccccagctaatactggaaaccatctgtgatggttaatactaagtgtcaatttgattagattgaaggggatacaaagtattgatcctgggtgtgtctgtgagtgtgttgccaaaagagattcacatttgagtcagtgggctgaggaaggcagacccacccgtaatctgctgggcacaatctagtcagctgccagcgaatataaagcaggcagaaaaacgtggaaaggagagatgggcctagcctcccagcctacgcctttctcctgtgctggatgcttcctgcccttgaacatcggactccaaattcttcagttttgggactcagactggctctctttgctcctcagcttgtagacagcctattgtgggtttgtgatcgtaaatacttaataaactcccttatctatctatctaatgtatcttatctatctatctatctatctatctatctatctatgtatctagcctattagttctgtccctctaagaaaaccttgactaatacagcatcattttgatttcttttagaaagtaggtaacttttttcccccatgttttatatttctttctttctatgtatgttcatgaaaacaatgtcacttttatttttatgctaatatttgtaatctgttattatactttgttttagatataaaaatatgaggcatttagctgaatctactctgaccctgaacttccttcttgaataaattcctcatttgaacttagttgaacttcatcttttcatcagtaaatgacagaatatttaacttcgtgatctgtgagcaatacatagttaactgaatcaaaggatgaaacaaactttattaagcctgcttttttagaatcagaaaattatgatagtcactgttttggtcagtgtcctttgacattttatcagcattcagcatgttattattttagcaagagtaattgcttcaatcacctaatcaacctcactagcttcatagtaaaggaggtataaatcatcatcctgcaaaggtttaagaccttctctgtaaagaatgtgagaagtcaggtttctttttaaaagtatatgcagtgcctacatttctgttttttgtctcctgggattactgtgattctggtatttcacagtgccagatttctgagttctacgtggatatgtgaagtcttactgcctagaaaactgtgagctgctagatcatcaccttaacagggaaaagctagtttctatgaaaccattttcctcacttgatcatttcaattagaaaaatggaagatcattctttgaaaataaatatttttagggggttccatcttcattttcacatttagaaagataattgaatgtaatttttcattgcatattttacctgtaaaatttttagttattattatattttactcagatggaaacataataatactacagatagcatccaattttactaaatacaagcaccttgaaaagccaacacctttaatggtacatgaaggagtgtgtcaaattaaagaaaacaaaactttattattgttctcttttttgttttttacagcatgcaacctcaaagagaaaagtttgaggaaatcacttcaaggacaaaaaattgcaatgtaaagagaattatttatctccaaattccagattacccccctgcccaacccctgccagcagcaccgtccacatggtttctcatttagttttgtgttagtttaacaaagtagactctgcaatctggataaaatagtaagtcacctcaggtaggtgccaataggatgctcctttggacattgcagattttaagtactgtctttttataatacaggaggcatgtacaagtctgtcatatgtggaaatgttgtgaacccatcatatatacaatgtgctgttttagaagatagattgtccatttaggtgtgttataacaacctagatgggaagttactttccggtgtgttcaaagttccttatctgattctgcagaggctgggatctgagcaggtcactctatctctggaggcctgttacttgatgataaatactaataaacatctcccgtcagacatctcatctttttgtggattcctgtagtactcttaccctttctacaaacatgtaaataccatccattgatataatttttttttttttttcttttgagagagagtctccctctgttgctcaggctggagtgcagtggcacgatttcggctcactgcaagctctgcctcccgggttcgcgccattctcctgcctcagccacctgggtagctgggactacaggcgctcgccaccacgcctggctaattttttgtatttttagtggagacgcggtttcaccgtgttagccaggatggtctggatctcctgacctcgcgatccgcccgcctatataatattcttatttaacccttggttaatatattggcatcagtttgttttaacaacaataacataattatccctaataatcagcattataaaagctatcataatcgcttacataactacaactattatctagacaataataggttagattaataagaattcagtgttattcaacacattgctaaaatgtttccatgtacttttatcttataagctaaatcttaggagctgttactcctggaatagaacaatatttcattaatatatttaaaattttaaattagtaaacatttttctgagagattctgattctatggagaaaaaataatgtgatcaagaatttctattgctggaaacaaactaacaaatcatttagttcgaaagcccctcttacaaatgcaggaactgagctgattgactcttcatttaatgataatactattaacaggtaatgcagttttgaaggaaagcacaggctgaatacagaaatctctttccaagaggtggtgagtctttacgacaattgaatacgtgttatttttattcactaaaatttggctaagattgaaagggtaaactttgtgggtctttcaggagatcttttactaaaataagtagggccttaatcactgctgaatgaactttgtacagaatgggcccacaggcctcatctgttgtagctgggattgctttgagagaagtggatttgttgaaaagtggatggaagaacacaggatttagaattggcatatttgactatagcttctgcatccacctatctctgcgctatagaaatgattaaagagaagtgggaaaaattcataaactttatgattatttttaattttaaggaggacatgggacctttattaaaaaaaatattcccatatatgaaagattcttatttctataatggggaaatggcgagactatgaaaaaaaaaaaacaaatatgtaattgaactttaatgtataataccaaaataaactataggtcacctttggcagtatatatgtttaaaaataatttcgacgtttaaaatgccttaagagaggaccattaaggtcagattgagaagataaaagaattgatcttttagggtgccattctactctatagctctgtaatttctatggttatgatggttctcttttgttaaataaggacttatagaaattatttattttatctgtttgtatttatttatttgcctgttggtactagtcaactgcttccccttacttccctccacttgctacaactaatcaaatgtcatattttaagattatttaccaaggttgctttaaatttttgtctcctttttaaagtgtgaaaattatttattttaaagttagcattcatttcattattccttctttaataaagtatttattggccgggcacagtggctcacacctgtaatcccagcactttgggaggctgaagcgggtggatcacaaggtcaggagttcgagaccagcctggccaacatggtgaaaccctgtctatactaaaaaaacaaaaattagctgggtgcagtggtgcacccctgtaatcccatctacgcaggaggctgaggcaaaatcgcttgaactcgggagacagaggttgcagtgagccgcgatcacgccactgcactccagcctggatgacagagcgagattctgtctcctccgtctcaaaaaaagaaaataataaataaataaataaataaataaataaataaataaataaattctttattgaatgatggaattcatgtacttccaaagttctgagaggcaaaacatggtgatggctgattctttgcctgtaatatcttgctatgttatcaaagcaagtcaaatatataattataatatagtttaagaagtgccgtaatagatgaacagtactactatgggaattctgaagaaaggaatgcaaatcggacagggggaagagaaaatgttttctgtttctgaatagccagggatatttatgacattggactgataaatgcagagatctcattcatgcctccctgagctaacatgtatgtttcccttactactatgcaaacttcaagaagggaaacgttttctacagtatctagaatagttttttgcatagagtagacatacatgaaacaatgatacacattaattactttctcagtaagcttgataaaatggaagatgctcaataacagttcagtttcttgtcccttgagaagtggtgcatgaattgtagcctgggtaagtttcatgtctttgtatgcttttgtttcttttttatgtctaaatagtaaatcaggaggaatttcttggatatgctggtggttaagacttgattctttggttttaataatgttaatatattgaggtttagttgtgactgaatataaaattcattgtttttaacttaaaactttaaaatcaaattgcagaagccttggccaaggaataattgtataaaatacagtgtctgaacttgcaagctgttcttttatctgatttgtgaacatttattaacatgaccttatgtattagaatgtcctatacaaacatgtcaaacaatcaaaattcaaagcttttcattttcaaaagctgcctaaaatgccactctctctagacaatcaccctggaagtaatggtctcttctctgaaccatcataattctctggttctttcaagaaagagttaaatgctttccagtagtttctttctgatcttgattgttctcaggggtctcctcagagttattttatatattttccttgaaattttaaagagttatttgtggatgaattctcatagaatatatttaattatggaggttctcattatgcttcatacatgggaagtaattctgaaacaaagaaagtaaaaggccgtaaactctctatgggctgctttattaatcaaaggagatatagaattaacccattagaagtactctactttctctgaggggaacttctttgttctgtagattggtatataaattgaaatgtaattatttgctcagttttattaacatatttaaaaagtaattgaatatttgcagatgagagagaaagaagcaataaatcaagctactaagcatttattgaacatagacttgctcctttaaaaaaattacattccagtttatataatgagaatgcagaaatgttccccatctttccaagtcttcttcatccttcagtttaaaggaaagacatcaagttgacattttgggaagatggaggcagtagcttacattttgattctccctaagtgtttctattatgcaaatacagaggaagaaaaccaactagaaagtatggcagttttctgagaatagcactcaaagctggatctcaaatagcactcaaattagatctcaggatctaatttgctggttggttcatggagaccacagtaagatatggatcctaagaactctcatactataaatcagaaactcttatactataaaacagacgctctcttccaggtcaaagctttgaaataggagacactttttggactagaattcatactgaccaggatagtgacagcaagctcaaaggaaaatgttggtccaggagtcaggagttggcaaactttttcagtaaaggtccataaagtaaatttgcaagctctattggggtccacatatggtctcctgtatctcttttctccctctctctcttctttccttctcttttatttttaactcttgaaaagcctaaaaaatattcttaacttgtgagcaatgtgaaacaggcccaaggttcatatttagtccacaggttgtagtttgcttgaactctgtagaaatgaaaaagggaagcagaggaagcaggtctcagaaagtagggctccacagagggcgctttagagccacaaagttggaaatgctgaaagggctcatcactcttttctaaaaggacatgaaaacttattttacttaaaacagagcaatagaaaaaggtgagtcaagtcttataccaatttaacattgggaaaaaaagaataaggagtaccagaaatccttatagattaaagaatacttgagagacatactctcaaagaaataaacactgtaacctaatatttgaaaacaaaatatgttaagaatatgataaaaagtgtgagtgaccaacgcacattagaataatgaaaacacagaaatgtactaaaatacactactctgaagaaatgtttgcaaagtttttttgtgtatatgcacgcatatataaaataggtttattgaatgaatgctgatttccattgtcaaatgtgagcctaaaaaattaaccctccctctttatgcttttgcatctaaaagaggttctctgggttttataaagcatataatgagatactgtcttaattctctgtctcttatcaggtattttgtctgagagaatttcctgatttttgaagccatctaataattggagtatgtactaaacagataggaatttattttgtgagaaattttattgaacaggtacatgataatagaaataatgtttgtaagttcagaagttagaataaattaaccctattttcaataagcaaattatatgagtgagatggatattttcttacattcatttcttcattattgttttgatcgagtctcaaaggatgattaaatctgttgaattttatcaaatttatcatttatctgaaagatgaccttttctaaactacatagtgcactttatgaatgtgcaccattctgggaggagaggatttccacttttctaatattacacttcttgtaatcaatgctgttctctggaggatttttgtttcatggactagatgttctttgtaaattctcaacatgacctaatataaaaatcaatacatctttaggtaagttcatttctattattagatctggctgtagcttcacgctaacgtgtttcgaaatataagcagctccctaccacagggcatggctttttcccggtaatgtattaaatttcattatggtagaaaccattacaacaaaaataaaatccactacagtctcccagctctagcagattgccagcaatgtgtttgctttaatgttctcattacaatatttatcttgattaaggcaaaaatgcttttgtccaggtcgtatctctattagtgatctctctccacaacaacagaacatggggttcctggcttagcaaggactgaaggaaacactttaccgtgacacttgagtgaggacagacaggtaaacgactgggagcttagagcagaaggaaggaaagccatgcacacagcactagttacaagatagattagcatgaacaatgtatttcacagactaagaaaatgatgattaattctacatttggcctattcttgaagaaacttgcccaaattgaacaaaaggtgccaaaagaagccctggggacatttgaggtctgctttattttattccctttttgaccagggaggtgattaagtaagctccaacttggtttttttagccatcattagagcattccagcacaaggaaagaatttagaggctctttgaagtggttgtagaaagatttgcattgaactatactcctcctagaattgagagtatttggaatactttagtgactgaggtttctattcatcttactcttccatcagagcacaactttttgtaattcttatgtgtatttggatgtgtgtggctttttattggtcacccacatttttcattatctattaaaaatctcattcatattctagcttcttaatgatgtgtttgattgaaatagtcaggctatgttttttcaagtttagcatagtgaaaagagagatacttttgaagcaaaattattatgcatatgcaagggagctgtgagtcagcaagttagcagaaattattggggcctgatcacaatggcggtgtgagaggtgttctccaggtgagttggaaaggggcaaaagggcagttataggacacgatggagaaaatcaatcttcaaagcttcatgataaaatttcaatatttagtttgaattatttccagaataatagacgtgctcaaaataacgacactaaaaatagtctttaaagacatgtaattcttggattgtctgcaagttgggttaataagaactgttgtgtcctttgataagcactgataattttattccattgtttaatctaattctcatgttggtgtcccatcattaagattttgtaacatcaccttgaatcttaaaagcaaaagtattcaagatgggtcttaaaattccattgctgtgtgccatgagcattttttttgacatttcatgttctatgatgcttaaggggaaaacatcatgaaaatcattaccctaatattattatccaacatggctgctcacaggttaggaggaaaagctccaggattgttgcaaggggatggggacttacctagtgaagaagtagactaaaagttgagagttgtttttttaatctcttaaagagttctttttttcactcgcgtccacgtgaaaagaccgctgaacaggctttgtgtgagcaacaaggctgtttatttcacctgggtgcaggcgggctgagtccgacaagagtgtcagtgaagggagacaggggtggggccattttataagatttgcataggtaaaggaaattacagtcaaagaggggttgttctctggtgggcaggagtgggggtcacaaggtggtcattgggggagctttttgagccaggatgagccaggagaaggaatttcacaaggtaatgtcatcagttaaggcaaggactggccattttcacttgttttgtggtggaatgtcatcagttaaggcaggaacaggccatttaaatttcacttcttttgtgattcttcagttacttcaggccatttgcatgtatacgtgcaggtcacaggggatatgatggcttagctggggctcagaggcctgacattcctgtcttcttatattaataagaaaaattaaaatagtgttgaagtgttggggtggcgaaaatttttgggggtgctttggagagataacaggcgatgtttctcagggctgcttcgagcgggattaggggtggtgtgggaacctagactgggagagattaagctgaaggaagattttgtggtaaggggtgatattgtggggttgttagaagaaacatttgttgtatagaattattggtgatggcctggatatggtttcgtatgaattgaaaaaagaacggaataagacaatgagaaaaacaggtagtaaaggactaagaattcggaggacctagaacatccaattagagagtgtctaaggaggttcagcatagccctgccagcaaagattatttatttactttaagagggagttaagagtggtggtttggggatagcaccaggagataccagctgtgatggcttggagaaacagtgtaaaccggcagtgtaaacaaaagcagggcatttatgagtagttgagaaaggtgaataggagtatgactagacagaagatagtagggatgacaagtttttttttggggggctcagtccaagttggtctggtgtctggaatgagactggggcctaataaaaaggagcgtctatacaggagctcaaatgggctgtaccttgtagcattctgaggacaggcctgaattctgagaagggcaagtggtaaaagtattgtccagtctcttttaattgatggctgagcatggtgaggtgtgttttaaaaagaccattagtttactgaatactaagaacctgagaaactacttgggtgatttgactaataaaggccggtctgctatcggactgtatagaggtgggaaggccaaactgaggaattatgtctgacagaagggaagaaatgaccgtggtggccttctcagaccctgtgggaaaggcctctacctatccagtgaaagtgtctacctagaccaagaggtattttagtttcctgactcagggcatgttgagtaaagctaatttgccagtcctgggcaggggcaaatccccgagcttgatgtgtagggaagggagggggcctgaataatccctgaagagtagtagaatagcagatagaacactgagaagttatttccttgaggatagatttacacaatggaaaggaaatgagaggttataagaggcgggctagtggcttgtactatagcatagcctacctttgctggtgtgtggcaattaggcctggtggaactgccatcaataaaccaagtgtgatcagggtgaggaacaggaaagaaggaaatatgggaaaatgggggtgaatgtcagatgtatcagagagatacagtcaggagggtcaggtgtggtatcaggaataatgtgggaggctggattgaagtctgggccaggaacaatggtaattgtgggagactcaacaaagagtgagtacagctgaaggagtcggggagcagaaagtatatgtgtgaggtgtgaggaagaaaacagattttggaagttatgagaactgtagagagtgagttgagcatagtttgtgattttgagggactctaaaagtattagggcagcggcggctgccgcacgcagacttgagggctaggctaaaacagtaaggtcaagttgtttggataaaaaggctacagggcacggtcccagtccttgtgtaagagttctgactgcatagccctgcacttcggctgtgggtaatgaaaagggttgggatgagtcagggagagctggggtgggggcagtctctaaagctgtcttcaaggaatggaaagagaagtggggaaaggaattaggatctatggggtcagctaggtttccttttgtgagtttatataatggttttgttaggatggcaaaaccagatatctaaagtatccaaccacgcctaggaaggaaaggagttgttgttttttagaaggtgttggggtttgagagatcagtgggacatgatcggcagggagagcacgtgtgtttttatgagaattatgctgagataggtaacagataaggaagaaatttgggcttgactgaagtaatgggagctgtctgtgaagccttgtggcagtacagcccaggtaatttgctgagcctgatgggtgtcagggtcagtccaagtgaaagcgaagagaggctgggatgaagggtgcaaaggaatagtaaagaaagcatgtttgagatccagaacagaataatgggttgtggagggaggtattgaggataggagagtatatgggtttggcaccattgggtggataggcaaaacaatttggttgataagttgcagatcctgaactaacctgtaagccttgtctggatttagaacagtaaaataggggaattgtaaggggagtttacaggctttaaaaggccatgctgtagcaggcgagtgataacagtctttaatccttttaaagcatggtgtgggatgggatattggtattgagtggggtaagggtgattaggttttaatgggatggtaaggggtgcatcatttgtcaccaaggagggagtagaggtgtcctatacttatgggttaaggtggggagatagaaggggatgatgtgaaggaggctttgaactgggggaaaaggcagcaatgaggtgtggctgtagcccaggaatagtcagggaagcagataatttagttgaagtgtctcggcctaataagggaactgggcaggtggggataattaaaaggagtgcttaaaagagtattgtctaagttggcaccaaagttggggagttttaagaggtttagaagcctggccgccaatacctacaacagttatggaggcaagggaaacaggcccttgaaaagaaggtaatgtggagtgggtagcctccgtattgattaagaaggggacggacttaccttccactgtgagagttacctagagcatctgtgatggtcctgtaggcttctgaggcaatcaggcagtgtcagtcttcagctgctaagctgagaagatcagggaaggagtcagtcagagagccttgggccagagttccaggggctctggaagtggctgccaggtgagttgaacagtctgattttcagtggggtcctgcacagatgggacacagcttgggaggaatcctgggctgtgggcattccttggcccagtggccagatttctggcacttgtagcaagctcctgggggaggaggttctggaggaacccctggaagctgtggttcaggcgtttggagttcttgtgtgctggagatgtggctggggtttgtctcacagtggaggcaaggaattacaactcagaaatacattgctacttggctgcctctactctattattgtacaccttgaagggaggttaattaactcttgttgtggggtttgagggctggaatttaatttttggagttttatttaatgtcgggagcagattgggtaataaaatgtgtattaagaataagacggccttttgaccttttagggtctagggctgtaaagtgtctcagggttgctgccaaacgagtcatgaactgggctggatttttatattttatgaaaaagagcctaaatgctatctgatttgggataaagaaaaaggagcattaaccttgactatgcctttagctccagccaccttcttaagaggaaattgctgggcaggtcggggagggctagtctcggaacgaaactgtaagccagaccggtgtgaggaggggaggtgataaaaggattatagggtaggggagcggaggctgaggaagaattgggacctagctcagcctggcgaggagcagcctggggaggaggggagaggtcagatgggtctgtagaaaaggaagactggaaagaggaaagactcagcgacgcttggggttgggactgaggggacagatgggagggaaagaaggaaaatttggacaagttgcattgggaacagagactagggagggacccatgtgtaaaagaatgcctggacatcaggcacctcagaccagaccgtttgcctattttatgacaagaattatttagatcttataggatggaaaaatcaaaaatgccattttctggctatttggaaccactgtcgagtttgtactggggtcaggcagcattgcagaagaaaataaggcgtttaggttttaggtcaggtgtgagttgaagaggttttaagtctttgagaacacaggctaagggagaaggaggaatggagggtggaaggttgcctatagtgaagaaggcaagtccagagaaaagagagggtagagacatggagagaaggggtgggaggtgcttgccccccaggaaagtggagaaggggtagagacatggagagaaagggttgaggggttcttgcaccctagaaaagcggtacttgccgcaaagggtgaaggaccaaggcaggcgtcccggcgtggtcagacacctttgaaatgtgggtgaatgatcaggcaggcatccctgcgtgattaaacacaaaggaaagactgtcttcccgagtctgtgaatggtgctggagttttgggtccacagataaaacgcatctcctgtctttacgagaaaaggaaagaaactgaaattaagagaagggagagattgaagtgtggcgccaagattgaaaggagaaagagattgagggatagtgagagaggatggagaagagagtaaaaagaggccacttacctgatttaaaattggtgtgatgttccttggactggttggtctgaggacccgaggtcataggtggatctttctcatggagcaaagagcaggaggacaggggattgatctcccaagggaggtcccccaatccgagtgacagcagcaaatttcactcgtgtccgtgtgaagagaccaccaagcaggctttgtgtgagcaacaaggctgtttatttcacctgggtgcagacgggctgagtctgaaaagaaagtcagccaagggagatagggatggggccatttaataagatttgggtaggtaaaggaaaattacagtcaaaggaggttgttctctggagggcaggggtgggggtcacagggtgctcagtgggggagatttttgagccaggatgagccaggagaaggaatttcacaaggtaatgtcatcagttaaggcaaggactggccattttcacttgttttgtggtggaatgtcatcacttaaggcaggaacaggccatttaagtttcacttttttttgtgattcttcaattacgtcaggccatttgcatgtatacgtgcaggttacaggggatatgatggcttagcttgggctcagaggccggacacttttgtataaagcttatttttctgaggagtggtgaagattgtaatgatggtcccttcttgtactcttccccagttttgcatgacaattggctagcaaatttgtcaatatggtgcaattagtcttgatcctcatgaacaaataaatgagaaataaaaaagaatattgaaatataaatccatagaccatgcaaaactgagaactatggcccatccagtgagagacctagatgctacaggacagatgacagtagctacctagttgagggaaacttctattctgtggaaagaaagtaagagtagcctttaggtgcccagtgatattaatcctaatctgccaattaccagtgacatgaccttgagaaagacccccaagttttctggatcttcattacataaatggcaaaaaaaaaaaaaaaaaggatttctcagatgacatttcattataacactctgtgaatggtttttattaattatattcttataaggtttgtatattttggtttataaggaaagatctcatttttatgttatgcaattaacctaaggaaatacataaagaaaggaagacacagccataaacagttctgaagggtcatttctgtacgtgtctcttctggattctttatagatatatttaagagaacaaaaagaaaagatcaagaagaaaacaaagaccaatgttatttagttacacatctttcagtgtcaaagaattatttgacatcttgaagatatttttcgctaggattcttgattggtcagagaatgttgttaaatacaagatttttctgggaaaagaatgacttttatgataatcaatgttctttgttcaattcctggacaaaaatcttagcccttcaataacgggcttttctaattctgttttgtaattgcagtaaagcgtcttggaggatttatctctagtgatacaggccagcagtatgtggccttttcttgaacccgtcagaactgtgacttttctttgaactcttggctgcttggtgctactgaccttgttgctcatttataacttgggtgccatttatcactcccagacttacagatattgttgtggaaagagactgaatgcaatcattcatgccattgcctctttctggtggtgccttccagcttccttccttacaggataactgatagggagagattagtgacaaagctgtaattctattgagggattgtgatgtaactgtatcataaaccatgaagtgagactccagagatttgagatcaccagaatgctgagattaagttacagcagccacagtcaatctctgtcaatatgtgttttgtgagggtttgtaatctgcctgtaaaatactagctacctgtagaaaattcctctttttatagtattgactttatataatttctgcaatttcagagcttaaaagaaatattgatttttatttttacaaatacatacagacattttaaagaccattaagaaagcttgctctgagttggtaatgtatgttttaattctgtgaaactttttgttggtttctcatatgccacttgaaatatttaggttttaatattttgaaatgaaatcttttatgtatgtataaaattttaaaaactaatttattgaggtgaaatctacataataaacgattttaaagtaacaatttaatggcatttcatgcattcacaatgtagtagaaccatcaccccatctagctcctaaacatttccatcaccccaagttaaaaccttgtacccattcagcagtttcttcccacttgtccctcttcctcatcccatgtgtgaaattttcaaattaaaaataaatgaattgacttgatattttctttacttaacacttaaaaggaattaaagacattatgtttgattaatcgtttcagtaaacttatgcctctagccacattttcataagccatttgtggggtggggcttgaccaagtaatacaagtctttggaggttttaatagatatgatgtattacctttgccaaagaaactggagatgctaatataaacagatttccttactggaggattttttgtagaaacctttcatgtgtcaatgaactctccttctctcaagtctacagccacagtgtacagcacttcctgaattaattgcctcttttttctggagtattctgagtctactgctaagactcattcaatgtaaaaaaaaaataataataatctaggcctaattatgatattgttggaggatagtaccaggaaataggagctttttactaaagggatttaagaaatctgaatctgacttttaaaactagtattcacattatattctttgttaaaaagagcaaaagtcctgagatacagggtttctgaaatttcatctagtaaattaaaatagtggttaatattttgtttttttaattttgttttatattattttattttatttttagagatagggtcttgcgtggttgtggttaacatttaaaaaactttcatacattatctacatttctatcagtaaccctgaaagccaggattattgtcccaactttatggatggataaactgaagtgcatgagtaaattaactaactacatcaaaatatcttcctctagggttaaatgatttgcccaatatccatcccacagttctaaatggtggagtaatgatgtggattcagatgcctgtgcctccaaatcctgcagtctttctttgtaccctgcagcactgctgtgtaagcatgagtttggactctagttttctgggacttcgttttcatatttataaaaatgaagaaactgaatcttctctaaggtctcttccaggtttgaaattatatcacttaaaccctgtactatttcctagtctgtttagaggctttagagaaaaaaaaaaattcatatatcaagaatcccaagatctcaataaaaaggttaaactacattcttgaataagtgaacaattacaacagctgacctttatgtaaacctcccagaactcagagtgaattatagaatcaaaggaggaattctgctccatttttataaatatagttaagaccaacataaatacatgacttggcttaaacactaggaattcttagacataggttgaacttgcaaagaaggtatgtgtgtgttagcctctgcctggccatcctttatcagataaagagttaatactggagcctaggcctgtgttcaggtgggaggggaatattaatataaatctaccacctttagaacagcacagttgttattttattagaggaaaaggtgagagtgaatagatgtggtcaaatggattttgttattttttcctttcctaccaataaaatatatattttttctgtttataaagaccaggcttttttcctcttttttaaaaaacctacatctcaattcccaaattttccttctttctgattgtggtaaaccctgttaaaatcactgtatcatatacatattaccacctatgaaaaagattttatagctttattttctgtggtttgtattatttattcctatggaactatgaaatactttttgtgtgctttggaaaatttcaaatctcatactaaatacggttctcaaactatatatctcccttttcttcatcttttaccctgatattctgctatcacctctcagccttgttctatatttcaaattgtggttaagtgaactccttaggctataaagtaaaagttttgttctcgcttcattttcgtaagaaggactcctctccattattgaatgaggaagctgaaaacaggaattctgcctaggggagagttatctggtaattaaatttgctgtaggttatctggatcatgaaaggaaagggaataaaccctcagcagattctattgttttcaatatttatggctactaaaaacaacagactgcttttgaagacccaagtgggctttaacttcacatgtgacttttataattatgaagagaatcatattaaaaaaaatggaaacttcataacttttccccaaatccattcttaatcttttgatatttagcatttgcttttgaggcaattgtcttttcttcagtagttaactagagtaagccagctaaatttttcactgccagtttctgtccataaaataaaaacagtcctccaaaatcactttcaagaactttatgaactctcacatcttcttcataatttgtaatttcacttagcaatcaatttccactgtcagatttttacaactcctgaggagaaactgatagacaggttccattaggtggttgatatgatgagcaggaatggaagttagcatgaggtggaaaggaaagtttcagtgaagtctaattggttaagacataatatttatgttgaatttatttgtatgatgtggcttcatgacagtggtgggccagaaaataaatatacaggtgtcacagaccactttaaacaccatagccttctggaaaaataattttatgcactatagtttgttctttgtatttgaacgtttttctcctaataaaattgattttcttcttagatgtatcaccaccatccagattaagcatttgattccatttgtaagcctacccacatttatcccttgtccatccacaaagagagagacatgagaagtgagtatagagttagcgtcacctataactagctctcctaatatatcccagacagcttactaaccatagaataggtcaaattcttcctatagataatcttggatattgaccctcctgtcaatggacaagcggctgctcaacagcacctggaggtctatgaaatcctcttaggaacatgtggcttgttctgacacagcaaacagatctatgcaaggactcataaaatctgactgatttatcctaggcaaacactaggatattgccccctctggtccattctatgtggtgggggcacataacaggctattcttgcttttcatcagcgatgttcatggaaattgtcatgacttatttcattgtcaaaaagattgatttttcccataggaacaactgtaataggtggtagatgttgtatttctgaccaaggaagggaaaagcatacaactataaaagtctgcaataatttaaactagcaaaattgtgctcaaatccatagactggggaggaatgcattaaacataccagttatataaataaaattttgttataaatttgatatagaagtatagttgtgataaacacttaactaaatgactgttttatttgctttcttagaaattagaatgtttttgaaatgatttgttttttttcatctagctttacaagctatccaggaaaactgagtcaatgtcttattttttctttctacatatttttctgaagcaagcagatatgttttgcaaaaataatttacaggttgtattttattttattatttttatttttgccaagcctgtgtatcattatgtattgagtgagacttccaagagtgtcaaaattgaatagttagtggtgaaatttaccaaacgcagttagctgatggaccctgagggcctcaaataaaaatatccaaggaaaacctcttgaagcgaacttttgtgtttcttcatgatggatgtgttctttgagtatggcatgttcaggtttccagagccctgtctgaagatgaggagacttaaagaggctaccaggttaatccctccctgtaggccttggcatttctttctcagacctcctcgcagttgagcatgttggcaccatctcaatgcctacttccttcccacctcaggctggattagagaggattctctgtgatagacactcatgagccacagacattcttctcttctggtccttcactgccatacctctttctaacgcagaaacatgtgttccttgtctaggccaagaatctggcttattcagtcaaatgtatgcattctaaagaaagaattggtacacagtaaatgaagtgggaagtgtgagttagcttcagagatcattttacatgttaagcactgaagcatggaaagaatgaatgtgaacttagaagcctgcgtgaaggataggacactagcctagaactcaggaaaggtgtgctacggatggttctgccacttatttgctgtgtatatttgagaaagtgtttaagctcactgcattgcagtttcttagctgtaaagagaaccaactttaacattcccgattgtatgtttataaatgaggtttgcctttattcctttctgctatatcggaactagcaaataccaaacatacagaccaaataaatacataggaatattcaattaacatgctcatcttaactaacttataaaattctatcttgtttatatctagttgtattaatcagggttctccagagaaacagagctaaaaaagttcagagaaacagacccaataaatcatacataatgtgattaatattaatatataaaaaatcatataacatatcatgatatatattaatatattttattatatatttatatatcattatatattactatataataaatcatagtatatgtaataaaaaattatatattatgtattatataatatagtatatattataaatcatataatatatgtaattatacatatagagtatagatgttaatatatgatatatatactgtatataattatatacatactatgtacatactctatattataattatatatagtatatatgtttatatatgatattatatcataatatataccaaatatgatactacataaatactatacattattgtagtatagagtatatataatatatatatcataatatatactatatgatttattataaggaattggcttagattgtggaggctgagaagtcccaaggtatgcaatcatcaagctggagacccaggaataaagatggtatagttctcatccaaaggccaacaagctcaacactcaagaagagcccatgtttcaggttgagtctgaaggcaggaaatgaccaatgtttcagctcaagcagtcaggcaggagcaattccctcttactcacagaaaggtcagcctttttgtttattcaggccctcaatgggtcagatgagggtcacccatactggggagggtgacctgctctccttagtctactgattcaaatgtgaatcttgtttaagaacgccttcagagacacacccagaataatgtgccaccaaatgtttgtgtaccctgtggctcagccaagttgatgcataaaattaacaactcactactcagaaacggagatatgtaggaggtatgtatttgtctctaagctttggggttagctactgctgtttattttccaaggggctttaaagatgtttgagaaactaagaacactagaatcatatggctcatcccaaaagctcatccaactcaggagcctccaactttcataggaccattcatgtggggggggtggcagcatttttctttgatgtgtgtcacaaagagtagagattgaaattcaaaggtacgacttccttttgataaggctctctcatctatgaagtcatctacagttttcttgaaactctttactttcatctctattacctttcaggggtttcaagctgatgaagtccattgagtagaagtatgcattcattttccaaaaaatgttttcttcaagtttcaaggacatgcttcctttttggctcatcctagatttgaaaatgaatatgtccttcatgtttatgtattcttctcatgatctgtacttttacaaatgaaaaatcttaaattgcctttattctattttcatctagaactttgtcttcatatggattacttcaattgcccttgtgttataataactacaattgctactggatatgaataggtgaaaataggaaaatggggatactggataactaatgggaagagaaagatggtgatgtctttttgtcttttttttttttttttgagacagagtttcactcttgttgcccaggctggggtgcaatggcgtgatctccgctcactgcaacctccaactcccaggttcaagcgattctcctacctctcagcctcccgagtagctgggattacaggcatgcgccaccacacccagctaattttttgtatttttagtagagacggggtttctccatgttggtcaggttggtgttgaactcctgacctcaggtgatctgcctgcctcagcctcccaaagtgcttggattacaggtgtgagccaccgtgtttggccgggtttgaacttttgcacaagttcttgcccacaatcttccttaccttgtaaatactgagttactttctcaaaagtcagctccaatattcacctgtcttatgaagccttccttcatcttccacaggcacagatttccttttcacttttctatagaataaatgcatatttattatgatgcaaaagatagttcaattgcaattcgttatgatttgagtctcattctacccattgtaattactatagtgtttttgagataagactaaggggaaattattacagctgcaatttgaaaatactttttggaatgttttgatacaacacataagaaattatagattcttgattgaaacgtatattttaaaaagtgaaacaaatttacagaaaaattaattgagcatgaaacaaaagcaaaaaaggtcaggaataaatttaattagtttttttaataatgagaagcaaattgcatcaaaacatgtttaagtcataactaaactaataagtcatgaagagagagatttattttttcagggtaatagaacttgaatgctagagtattattagataatcaaattagcagaaaggaatgagtcatctgaacccatggaaaaagacttaaatttattgctgattaaatgtgattattgactttaatgaggataacatgaaactcctaatgacatcaaagcaatgaagagatctatgacaaacaggctaataagtgttgtcaactcagcatgttaactaagtcaacttagtttcatactcatatactgtgacatttggcaactcagtcgacgtgcaggaggaacatttgcaatacctgaaatcttatttatatgaaagaaactcgataactttgccaaattggagaacaatcacaaaaattttcataactaccaataagttgtgaagatgaaagtttcctaaactatcaataatttttaagtttcaaatattatgctaaagaaaagacggagtttgttgatattgtgatattttcagctttttaaatttcaaaatttttatgattttttattctaaatattcatatacatgagtaactttatatttagtacgtttatattctctttctttctttctttcttttttttttgagacggagtcttgctctgtcgaccaggctagagtgcagtggcgcgatctcggctcactgcaagctccgcctcccgggttcatgccattctcctgcctcagcctcccgagtagctgggactacaggagcccgccaccacgcccacgtaatttttttgtatttttaatagagacggggtttcaccgtgttagccaggatggtctcgatctcctgacctcgtgatccacccacctcggcctcccaaagtgctgagattacaggcatgagccaccgcgcccggccatattctctttctcaaagaaggtcttttaaactgagtaagtttcaggcccaacaaaacttggaccaaactgcagaacacactttgcagatattagtaagcatttattttatttattttgtagtctgttaattccttatagaaggaaaccaggatgtttatctttaaaacctttgggcatagcacagtgcgtgatatgctatagtggaaattgcttagtaaatgattataggatgcataagtatctaacagaccatgagatataagaaaccctctcagggaggttctgagtcccctcttttactagcaaaatgcttgaactattcagatgaaaactattatatgatagcaatttatcatttcagaaaatttggaaagtactactttgagtagtccaactatccagtgaaagcatagcatcatttggcttagaaaaaatgttttcaaaggtgtctgattccatctttccctaattgtgatttaaaacacaaaatttatcccaaaagtaatgatgaccattttgaatgtcaaaagaaatttctatcagaaaaagccttacactttaactttctttcaactttgagtgcaaattataagtaaaatgaactccagtcagatcttcatttaacttaagagtatgtttagaggtagctattattagtgctataattgatttttctcccttttgaatatatctggagcatataattggatggatcaatacttttagttatggaaagttaaggaacaaaacatgaactaaagactctgactcttgtttcaataaagatgtgatactttcattttcaaagagaagaacagtcatactgtgaataaatttagtttattctgttgcaagtaagttttaggaaaggaatgatgataaactcaaatatgtttgagcttcgttattttaacagaatgatcatattttatactgcaatgagtaataaaatatgaatttttgttgtagatgtataaataaactaaatgtgtgacttttcttgtcattttcttaagattagacatataaataaaatgaagattctttgaaatttgtcatgtacaaagttatgtctttttattttctttaaatactgtgatttagagtatgcagtaaaatgatgtttcataataggtattttgtagtttgtttctcattttaaaaaatatgaaaataaaatcctaaaatgagaaattcaggtgaaggctttagggtaggttctcatttacttgtgcagactttaatatgcttctgcccttaagtgagactgctaatttcctaatggtcctatagaggatatgatgccttttgcagttccccaaggaacatcagagagaagaagaaaaaaatactgcttgggtttcaagattgaagagtgaaaaatctaaaaaagctctcaatagcctactgtagaaataatccccagtggttcaaactgcttagctagatgtaaaaaaataaacattctctttcccagcatgcctgccaccctgcaaattattttatacaagtctcactcatttggtcggtaaatatttattgaataactaactctgtgagtgccaggcatcatggcatattatcatgaggatatgaagaaacagattaaaaacttaacttgctcttgataaacccttggtctaatttgagaaaatagattatgaaaaatggtcatgttttcagcaagtatagagtgctgtgggagcaaggtggggcaagggactattagaatcatagaattctagaactggaagggggtttagagattattaacccacatttggacacacattttttaaaaaagattaaagaatcagtgcagtcaaaggtgaaacttttcattgatttagtcaacgaacaatttctgagtaatatgtgcccagcattgttctagatgctggggttaagacggttaaaaacaacagcaaaggctgggcgtggtggctcacggctgtaatcccagcactttgggaggctcagggaggcggatcatgaggtcaggagatagagaccatcctggctaacacggtgaaaccccgtctctactaagaatacaaaaaattagccgggcgtggtggtgggcgcctgtagtcccagctactcaggaggctgtggaaggagaatggcgtgaacccgggaggcggagcttgcagtgaacccagatcgcgccactgcactccagcctgggcgacagagcgagactccgtctcaaaaaaaaaaaaaaaaaaaaaaacaacaacagcaaaaattcttgctctcatggaagttacattttagtggcagtgaaagtcgcacaactaaaattgatctaagactagcattgagaactacgtaggtagagtaactagaaaataattaaaaatgaagatcatgaaatgcaccaggttgtagatgtttttacatctgtgtctccgcacaacagaagaaaaagcatgaccactgattcactgaaatatctgcaaagtagcaagtgcggctcatttaatttcaaaagataaccaaataaataacatttattttcattatagtagatttcaagatatttgctgaatccttgcagatcagagaagagtatttctaaagaagtaataggcaagtaaaaagtcaaatcttctggaaaactattttacagtagggaaattaaatggaaagctctttatttggaagactaattagaataaaggagcactatacctgtgttataaatggactctcttatggaaaagtttttgtaattctatataatactataattgtatggagtatatgaggtatatttgtatagagtatacatttgtatacaataaatttgtatagagtatacaatgtgtaaaatgcatagtggtactataattggttaaggattagctacacttcggaggagatctagtttacaaaatgaccagattttgtcattaatcctttttatagaagtgctaaaacctgggctcaaacacaaaacttgacctccaactctgaaacctttgctctgcagaattgttggctcatctcagtaagtggtagttgagtacacaggaacttacaaataattatgaaaacccttaacttctcagagttgctgaacaaaatgggattcttaactcctctacatttgtgaataaaaaaattcttcatattatgcaaaaattaatatgccataattttaaaaatcataagggtacgttggctttcatcagcctgtagcttgcacatagtttatgaatctagcaaaggtcatgtttaatctgtggagttgctagttttcatacatgtgggagggaaatattcaaaggtgtttgaatcattcaaactctagagatcaattctgactattttctggaatgttttttcttcttctagttgagtttttcttctccttggaaatatccatttcacaagggcatttttttttctctataatgttcaactattcctttctttttccgttctcttctccatttcctttttattctctatttctccgtttttgtggggagaatattttatccctgctgttttctgttatgcattgaggttcacactgtaatagtatgtggcaaaatcaattaactggtactaaaacagctttttaaaaatgaaatagaagggaaataggaggataataccagattatctactgtatgtaataagaacagacattttttaaatgaaacattatgaatctgttgtgtgtgtgtttatatatatgatactaaatgaattttttactgggagtcatagtaaaaagttaaaaaaccactggattaatgagtgttaaggacttgataaaattgtacagaattatttcaagtaacatattttaaaaactgaacagagcataagccataagccagggcttatgactgttttccctatggtgattatttgttttaaaatttttgtggtagcagaatttggccctgttaacatttactataatgttcattcatattaaatatattcaggttggaatggatttacttcacagaacaatctggccctcaggaaaaaggtgaaatgaggggaattttttttttttttaaatattcatacccaggatcccagacagctttctcttttgggatttgccttacgccttcctatccagtatactcttccacataagatttatcttaaaagtcattttcctcaagaaacattttcttaccaataattcatgtaccaacttactaataacacacttaacataaaaaggacagatgtggtcttctattaataaaatgagagacttgcctgctcttgttttgggattaaatgttttattatttcttttttttcaatcattcttttacagtaattgtgtgggaacaaaagtgataatgatttgtaaaattcttatttatatttaagaaatccatttcagagttctgtctgaagtaaaaagagtaaaagctccacatgccaaataattacttggttatttttaagctagtatagagattaatcaagaagttactgggaacttactgtttgaaatttatagatgtgtattccccatttgccctggtcgaccattcccattcgctaccaaccttataaatcctttgaatatgtactcgcaatgaataaacataatgaattattactctgggggtactcaaaaaattttgttgggaaaatggacttcttgtgccaagactcaatcagtgttagcagaaaccacagagagacacagaatatttgagtttaaatggcctcagagatcttaacttagggatttggactttgtgaccaacagctcacaggttcagggcctatccacggccatggactcagaggaagagtggtcctcaaacccaggacttctgagttcagttaaggactagttctaataacagttgtttcagatctcccgaaatactctcaaacaggctgtgataatgtacccccaagataagagcacagccaggtgtggctagccacaaacacaactatgtagacaaatattctaccacgaaagtttatacaaatgtgcacatacttaatggtgtttctagatactttcaattacataagattagctaaatcttagatgccaggaaagtggattgtaatttttttctgacttagtgaacccccagacacatgactgcgtaactctgtgagtgtgtatacgcagcacccattggtaacttaacctcctggtgttgagaaagaacaggcagaaaatgggtcatctccctttattgcaagatgatacttattaggtatagtacttaaaatggaacatccattttaatgagtgtctaatcctgataatcttgtaatatgtgatgctcttaaacttgtgctggatcatgttacaccaaattaaatttttaactggttcagtatacttttaaaagtatatttaattcatactttaccttctacctatttttcagttgctatattctcactctctcttgatttcggggaaccaaaacatatttgtatgattttctgaatctctaataaactctactttgggcgaacacatctatcaaaagagatgccctttcaagattgtattgacttgcaactatctgtagcaagctttgtttgtaaatcatcactaacctttttcatgttttaattttttatgaactgtttttagtgtccctctaggatttcaaatattgcaggagaacaaatgagttatgatgtgattctccgggctaagaaacaaaacatacttttcaaggttctgtctaaagtgtactcttaagccaaatcgtaagaacctgagtcttttaaaaatgtttccaaaactaagtactcacaaaatgtgctgtacttgtcctatcttagcacttgtcacactttattgtacaggtttcataatagtgagtgtcttgtaagaaactttacaacctatgaccttaccaggagcatgtttttccactctaccatttgcacctaatataataccaagcacattacaggtataagacaaatgtttttaggttaatgagaagtggtttgactgttgataagattttacttaatattgtgtgtattgtttgtgacataaccattatttgagaagcagcatatttagtaattaaagacaataacaatatacgtgcatttttttagatttcttattgcattacttaaaaagctctgaaaatatatggtgtccaaagcacatagctagctctactatcaggtggatcactgctcaacaaataccctgaataggtaagatcttctaggacccttactgataccagtgggacatgcacttaagaatacatacaacattgatttcatatatggtattcaaatttacatctctaaaaatgaaaatatattttcttactacttaatgttaaaatttatggtagataaaaaggaacgagatcatgtgctttgcagggatatggatgaagctggaaggcatcatccccagccaactaacacaggaagagaaaaccaaacaccgcatgttctcacttataagtgggagctgaacaatgagaacacatggacacagggaggggagcaacacacactggggcctgtcagagggaagtaggagagggagagcatcaggataaatatctaatgcatgtgaggcttaataccttgatgttgggttgacaggtgcagcaaaccaccatgatacacgttcacctatgtaacaaacctgcgtgtgcagaagtacgtgtgtcccagaacttaaaattaaaaaataaaaaaaaatttatggtagaacatgtgtgtaattttcaaatgagcataatatattggggaaatgattttttttgacaaatatgtgatttaaaaaaattgaatattactgtttacaagaccatcattaatatatatccagaatactatgacgatgcaaaatattgaatgatggttcaggaacatgtttactcttcattgacataagtgcagatgatgtaaacaatgcactgtaaatatgcacatattttaaactaccatttgagatcacattataggaaaattctggaagttacaagcaaatgacagataaatagaaaccaaatagaattgaggaacttgaaacacaggtgaagtagaaagccaatgaaaaagtgaaattgcctagcaaaactgcaaaaaaactactcagactggcattaacaagagcttggctagagtagtctatgaggttgttggcaggatagtttatcgctaagctgcaaagctgggccagtcagaatggccagttgggatgtgatggtgagcagtatcatcaacaatggaagctagaaataggagaatattatcttcaagtagtgaagggaaataattgttcatctagaactttctgtctccaagcctttaaaaaagaaggacaaactcaagatttttgcagaaaaataaatatagtgggcatttctcatcagcaaacccacataaaaaatgaaatgacttcaaaggaagtctgagatgcaagaagatatggtgagcaaataaaatagacacatgtttgtaaccgtaaggaaacatttaccaggtaaaagaattacaacattttaaaactaatgggataaaaatcaagaaaaataaatgtgaaagaagagaatataaattgagaaatgactgatgagatgaaagctttctgagttcctttcattattcaggagtagtgtaaagagattgattaggctgggcgcggtggctcacgcctaaaatcctagcacttttggaggctgaggtgggtggatcacctgaggtcaggagttcaagaccagcctggccagcatggtgaaaccccgtctctactaaaaatacaaaaattatccaagcatggtggcgggcgcctgtaatctcagctactcggaggctgaggaagggagaattgctggaacccagtaggcagaggttgcagtgagcccagatcctgccattacattccagcctgggcgacaacagtgagactccatctaaaaaaaaagagagagattaactttaatatgtaagtgaaacatcatgttaaattttataagaaaacagctaatagaacagaaacaatgtttatataccaaagcataaagagaaaaaaaaaaaccttggattttcaatgaagtgatttaataactatttagttaaagatgcaaaattaaagtactgacagtagagggcagggtatccctgatgctgtgctgataatttcttgaaattgcagagtatctcatgttatccctaaagtcatatatttcatgtattgagccagatattaaagattttatgtttaaaaaatactgataacacaatttactttttattaaaaacagagatcttgatatgatctgtgtaatatgaagacctagcttctagacaggaaatggtatatttattttcattctctggatttagaaaatttattgagttttgctgatacattttgagagtcattttttttttgcattgaaaacaattttgaagtctcttggttaaaaaagaaaaaagaaaaaaagtaactatacaacaggatagtgaccatcccaatatccaatctctaaataatggccaatattatttctggatgtgattctttagctatatgctttccgatcctataaataacttttaaaatccttctttgattctgaatcccttacaacatctttgtggtttagtgcagacaaaactggatcttatatcctgttttaagcaactgtgttaacatatacgaaacactcaaatgcttgtttctttgtgaataaataagatgttttatgttgccgccctctttatgttaattattctaattaaattgtcaaagtacagagtgtaactggactttaacattttattaattagtcacttaggagagcctaggttattctgctattagtcactgatatttaagtcacttgttattactggataacactgatatcattgatacttaagtgacttaaaataccagtgacttacagcaacaatattttatttctcattctgctacacggtcctctgggttgatcctagtgtgattccacgttgtcttcactctggactccagctcatggagcagtgtttctctgcaatattctaatctcatagaacaggagtaaaaagaaagtgccagactacatagtggctcttaaaatttctgtttgctggtgacatgtgtcacttctgcccacttttcacaagtcatacgaccaaggctgatattagtcagtgagggagtataatccttcctgaaagctgggctgtaaacacttgccaaaagtaacgccatctactacagtatctttatgatatttctgagaaatcgagccaaaattttagtcaaccggttggtgtaaactacttatacagatgttctgtacatattattattgtttagtcttcagtccctgaggattctgacgaaagtgctctaggaatctagtacattaagtcctgacttaatactgttaataggctcttggaaactgactgagtgaaaagatgaatgaatggggaaaccaatcttcccacaggctacttggtataaacaagagttaagttcctacagcatattttgatcacaaaaacatcagcaaacttctaactaaagactaaaacacttctaattttaaatattataataaatgtgagcaatgtatacatttaagaaagagtgataaaaacaagtaagacaattatttacccatttatttcagttcagggttgtgggtgtccaaaacctatgcagacagcttagagcacaagacaggaaccaaccctagacgggatgccatcccatcaaagggcacactgacataaacacacacacacacacacacgcagactgggaccatgtaggcatcccaattcacccaacatgcacagcgttgaggcgtgggagaacactggagaacggggagaaaactcatgcagacatgaggagaacgtgcgaactccattcagacagtggccccagctgggaatcagttttcttctcatcaacattataacaacatgattttatttgaggacctgctgtggactgtatattttatttaggaatgactatatcttatgttggtgatttttttttttttttttttttgagacggagtctctgtctctcgcccaggctggagtgaagtggcgcgatctcggctcactgcaagctccacctcccgggttcacgccattctcctgcctcagcctcccgagtagctgggactacaggcaaccgccaccacgcccggctaattttttgtatttttagtagagacggggtttcacagtgttagccaggatggtctctatctcctgacctcgtgatccacctgcctcggcctcccaaagtgctgggattacaggcgtgagccactgtgcccggcctatgttggtgattattaatggtaaggaaaaattttagaaggtcctgaaaaatgaaataatgctatgataatgagtttactttgctttttcacaaggatgggatggcaaagagagctcctggtctctccttcattctgtttctggtggaagggattatagatctatgaaggagagagggaacaaagaaaacaaagattttttttccttgttagaatcaactgtaggtcttagaagactactttcgtgaatatagtgttttaaatttacaaaataatttatgattttttttcataaaacttttagactaaggctggtaagctaacaggtgatatgattgccattttcctgtggaggattcagatttagaaataattagctcaggtaatgaatattgtaaagactgagaatttaaattttgtgactttttttttcttttacccatagattatgtagcttttcaattattgtagaagtcttaacgttatctttagtcatgctgtgttcctagatgtgactctcaaataaattctggtgaaaactattatttaaaaaatgaaatgactgacctaacatattgattatttttcaactctgctttataactgtaagaaaaactagatatgactaaaatatctttccctaatatttgaattttaaacaacttaaagcatgtatagctatcttgtccattattattatacttgtgagacaaatttgcaaagtaacaatatttttgaaattaagaaaaaatatagatcataggacttgttaaactagatatttctgtattaaaaagagctcaaagtcagctccttttttcccctttcattttagaaggctgaatactgatcaaatttcaggtctacagatatactctgaaataaggttattaaattcacatcctgctaggggagctacctaccttgtttatgccccctgggcatccagatttttttgttcactaaatcatgacaagtaacaattcacattacctaatcagtttctttagaataggaccatatagacagccaaaataatatttgagaattagtgagcctgcccacactgtagaaagagaaccgtatttattttattttctcttattgtatggcagtttaattattaaaggcatggtattgagtttgaatcttggtttattgccttttagatcaggggttggcagaccatagtctgccaaccaattattggttggtcagtcatttcattttttaaataatagttttcattttaaataatgaaaactattatttaaaaaatgaaatgactgacctaacatattggccccaccaatgattttcgcaacacagctgtgttttttgtgtaagtattgtctatagatgcattttctctatgcagcaacagagttgagcagttgtgatggagaccttaaggctggcaaggccaaaatattcactctctggcctttcaagaaaaaatttactgatccctattctaggcggatgactttgcccaagttatttaagtttctttgcctcatcttctaattataaaatgctaatgatagtctctactaagttgggtttgtgtgaagattaaatgatttactttatacaaaaaattagcatagtgatagattggaaataagtgcatcataaagactagttattgatgaaactatcatcttatcaagaaatatagactggcatgtatttccttgtcactggaggaaatataaggaactggtaaaagctcttataagagaatgaatctttggtgatatttcatcaagaatctggattcttttgtgctgaatctcttttctgggttccacggaattctagcctcttgcaagcctgctctggagtgccccttcttgtagcaggccctttcttgttatctgtggggctatctccatgtctacatctggaattgctcaaaggtcactgaagtattgaaactttattaatggatttgttcccctccaaattgctttccacaatgcctgcagccaggagcttatagctggggcatggcttttctgtctgattttggagacctcactgctttgccctttatttaccttctcagtgaggaacaaaaaggtttcattctgtttgctattagacatgaagagttttcatgagttaacaagttctttattgggcaaatgtatttcagtccagcatgtttaaacattacagatgggagcaaattttagggctttctgatttacaatactatgttcaatatcaggtaaattgcaaaatatgtgaagacttatttctttagctttgtgattgccaatattcttaagattgtttttcagattacaagtaaaatatgtaaattttagaaattttaacaaatatagagaaagaaaagtctgctttaagccttttcctcaattgtggcactttctgtcttgtgttctcttcacacacacacacagacacacacacacacaattgtactttatatagtaatatatcatatcattgatatgctttattgtgtcttgtatcatgtttaacttgatacagtcccaggcatagtttcctatatgattaatttttgcaacataggatttcagtctgtagaagtaccacaatttatttaaacagttcatattccaaacttaggaagagagtaaattgttacaacttttctaaaggttaatctgttaatataatgtgaaatttttaatttagagtctcttagacatagaaaattgcatttctaggaatttatcctagggaaactaataggaaaacctcacctaaatacaggtattgaaatgctcacattagagtgtataagagtgaaaatagttttgtgggctcaatgtccacgagtagaagattgtgtaactactttatggtgcacgcttccaatggaatgcagtctggttaaaagtgaaggagttcatttttctttatgtacattaaaatgctttatgctgttttaagtgaaatagagcaaatgaaatgaaaagaatagtttaacagatcttagtttggcaaacacacacacacacacacacacacacacataaatctggatgaatacttgtcatgatacctactgtaattaactctaagtactagcatcatgtagtattgtttctttttaattttttctttgtaacatttgtcagtgatccatgtattgcttttgtgatctgggaagaaaaaagataacttcaaaaagagaaaaaggatttattaggtatgagacacttcataaacctgtgcttccatttatttacaatagttgagaagatattgggaacaattcttactttttagtggaatcttcatttttcaagtactcacaaaacttgggaatgactctgcttacagtttaaaggtgctatggaaatatttttatccaaagattgtcagactcatggacaaatggggacattaggatttctcatgcaaggtggacagtcctgtgggtaaaagtacatgcttctagcttttgcttaatatgatttcttcagacagctgctcaatccataggaagaaggaaggtgataacaatggaactgaataggggacctcatgctgctaacactgagaaatcttataatcagtagagaggttgtaggactttttgcgcttgttaccattttgttctgccagtaaataatggggctataaaagtgcgcagtttttattaaataaactactattatggcaacctagaattattatcttgctcctaattcatctataaatagcatttgactaattagaatttaaaaattcaaaccaaacacatgtccttagtaagaattcctaattctaattaagtctctctctctttgtatatacatacatatatatagaaatacatatatgaatttatatatttcttatatatataagaaaatatgtatatatacacacacaattatatattatatgtatacatattatatattaatatatgtattatatgtatacatattatatattaatatatgtattatatgtatacatattatatattaatatatgtattatatgtatacatattatatattaatatatgtataatatgtatgaatttggccttcagatagtttgtgaaatttatgttaatatcctctccttctctctagtcatgtattatggtatttaattcataatgttgtaggtaaaaataagaacgttattgttttcctttgctttttttactactagtgtggttgaacattgttttcttattctatttattgagtagtttattcttgttagaaatcctcttacagttctttgcccttgttttcattagagcaaggggttgtaaactctgagctgcagaccaaattcaacctgctacctattcttgtaaataaagtttcattgagaaataaccctgcccatttatttacatattttattgtttatgtttttgtggttgttgttataacagaaggatcagatagttgtggcagagattctatggcctggaaagcctaaagtatttactctcagattctttatagatagagtttatgggatcctatctctgtattagagagctggtttataaaaaatatttttatcaatttgaatgagctatttatgaagtaaaaattttaacctttgtttcaaatacttttgcaaatattttaagtattttgcttgtctcattaggtcctgatggtttttcatctctatgagattcctatttccccctcttttgatttctcagaatgctgggtgctggagtgatggatgtagtatccaataacttagcacggctgccactatcctttttaccacgattccttttctcctttgacttatctctctttctccattttcctgccccacttcttactgtttcctgactttgctgttgttcgatcgtctgttttcaaagtgggatcattagttatgaaggaagatttttcatgaagagccaattagattgttatatagctttcttgtatacattattagtcactaggtgtttttataattaaaaagaaatggatgaaactctttcttcccattcatagtcataatccaatattttgaaaaatgtttctcaacaatggtggtgatcaaatgatgttgctatggcttattcccatgtatctaaatattataaatacagggagatggaaatcactagcccccatgataatcattatttctctccttcctaggcccatgtaaagacttcccaacctcccttgccattagggcaggggcatgcatctaattgtagactaaggttttgagaggaagtgccatgtgtcactttaaaagtatgattgtaaattcctattgatttggccacctcaggatccaaaagttgagacagcgactaaaagacagtgatacaaccagtatcttggttccctgaatgactatatggagcagagttcccacataaactgaacatttcatgtgaacaagaaattaacccatgcctccataagccactgagattgtgtgattaatttgttaccacagtataacccaatttattctcactaatccagaaatggattttagaaattgagttttgctatcacaaaatcctttatatgtactcagcaggcagtagacaagtgttgagaatgttgaccctgaagcgggcaaagaagaaaattaatgttacatggtagtaaaacatttggtgaaactgtgataagtcaggacttggaaggcagaccataggcctaggtaccttttagctcctggatgaaagggggaaactagaaccaaaatagtagatgttaactgctattggctatgtttggcaaggtaccgttaaaacaaaaatgaattcaggaaagaatcagctggctcacaagcagaaatgagaagaaataaagaggatctagaaatgaggattcctacagtatgggaaaaaacaactgcctcttgacccaaagcagtaagcaaagggattttacagagcattcaagaaaactgtttggttgattaaagaccttaagttgactaaagtccttaatagtgaggccttcccataggttattgcagatatgttgaaggtcgccccatccaattgagagaaagtgacatggggttgagaaaacaaagagctctctaggagatccaagaaccaggtatttgaaagtgtgagtgtagttactggcacagggcagggactggaaacgggtggagaagaagcctcttaagtatttgagggtaatgtgctgccgaaacgaccacaagccaggactgaagaagcctttgacggtatgaggctgaaaatgacctttgtgcactgaagcttatgtgagcaaaagggggctggcaaagctgtggagtcttattttcagatacagtcacagaagggaatggaaaaaaaaaagaaactgtcatagggtagagacagaagccacataccggtggggagcctttgctgcttgtgctccgcaggacttcaggatttaaatgggctgagacgtatgtcctgttcctctcctttctaaaagtgagtattattgtaattattctggctctgccaccccttcatttagagtgtgtgtgtgtgtgtgtgtgtgtgtgtgtgtaggacaggcaatttggcttttaaatttagaggtctccagaccaacagaaacaagctctggacttgggagggattattgcattcacgtagacgctctggactttgagattaagggactgactggatgggcttcaggctgtttcccatgtggtagtgccgagtatgcgttatgtgtcagaagaatagcaaactgaaaacttaatgagtaagaggtggtagataatagtcttcaccataattgatttttctccttttgcctgaaaatttcctaacactccttaaagtactcagggacaaaatttgccaatgagctgtgaacagaaataaagtgcttctcataagagtggctgtgagttctctaagctcttcctttgctatagcaagcgttaaagccatgtgtgtttgtgtgttccagcatcacaagatagagaagtctccctcagcccaggttccaaaaacaccatgaagaagagaaacctttgttaacccaagccagacacatgtgcaagaagagatcttttgttgtacaagccattgagatatgaagttaacattttaaaaaaatcaatgttacaacaagttctctatttgaaaagcttacctgggattagtcccaggttaataatggtgtagaacacttaaataagaaagcaaaggctgctcagaataaagactacttaatatacattcaagttaaaagaaagctgaaagatcctatttggcaaattctgatcccctaaaaactgtatttcatgcccttaacaattgttcataaattgtaagacataaattatttgattctaaacatattccttttttttttttttttttgagatggagtttcattcttgttgctcaggctggagtgcaatggtatgatctcggctcactgcaacctccgcctcccaggttcaagtgattctcccatctcagcctcccaagtagctgggattacaggtgcacactgtcactcctggctaatttttgtatttttagtagagatggggtttttccatgctgaccaggctggtctccagctcctgacctcaggtgatccgcccaccttggcctcccaaagtgctgggattacagttctgagccaccgcaccaggccaaaatatcccatttttaatgtgaactaccccaaaagaccaatgaatgctgtacatattttctttttagtacaagctattattttcacctataatcatggactggtagaatgctacatagtacccgatttaattatgcttttctcattttctaagttaatttagttttatctaaggacatcagagtaacttctttaatattttataagattctcaacaaacaacagtgcttacattagggaaataaagcattcactaattaaaaagttctgaggatatagatctacagttaatataaattatgtactggtttaatgtgtggtgataagtcaagaaactttatttaaaatatgactatatcaaattatttactttcctgcttaattgttggtacaaactttaatgaagattggagtttcctaggaaaggtaaatgagagttctaaaattgaatagcgttcactgcaggagaacttgggaaactgaaacttagttttatagagacaaagaaaataaaactaagtagataaaactgacctgtaatgtatttcttaggaaatacgtgcatgcatatcttttttgtttctataaacaatcatttctacatattctttttataataatgtggggattgtcaaattttcatgtttgcaaattaaaatctatacatgaaattgcctgaattgtgaaaaactatagctattcctgaagcttttcagttaattttacaaacattgagtcttattttcttgtttaaactttgctcttttctttagagtacagtctttttatgtctctcaagcagcctctgatcttgcactcgacctgcccataaatatgagacagatggaaataaataatccactcgaaaatccacttgacacaagtactacattttatgtcttacaggactggaaatggctctgaatttaaagtcatttcaggactctatgacacttagagaagatgtcttttgatttttcccatctaactagaaatttctggccttcttcaaccttcatgtaatagtgaatttattgatactgcatttgcaaggttgacgtttcatttctaagaaaagaatgtttactacaattagatgagaagagtctcttctggtcaaagaagatctcttaagagtagttcacatggggaaaagaaaagtgagtatcgtttatttttagtagtgggcttgtattgctgttttgcatctgcatttgtaagtagctttaaaaatccaatatccatgccaagaatgattgtagaaacacatacaaaccttatttttttattccttacattactttaatttcaaatcattcgtatgtatttcctagtaaggtaagcagaatggttctttttcacggcatcccacaaattctcagtgtaattcagtagtcctctcttatccgtggttttgctttctgaggtttcagttttacccacagtcaactgcgatccaaaaatattaaacggaaaattccagaaacaaacaatttagaagtttaaattgcgcaccattctgaataacgtgatggaatcttgtgctatcctgttctgtccagcccaggacatgaaacatccttttgtctagcatatccacattgtggaggctactccgtcctcagtcacttagtttctgtctcatcatcagatcgaaaaacacagtatgtatcaggtttggtactctctgtggttttaggtatatactgggggtcttggaacacatcctcctaggattagtagggactattgtaatattgcattgaggacaactctttgtcaagataattttttttcttttttttttaaattatactttaagttttagggtacatgtgcacaatgtgcaggtttgttgcatatgtatacatgtgccatgttggtgtgctgcacccattaactcgtcatttagcattaagtatatctcctaatgctatccctcccccctccccccaccccacaacaggccctgctgtgtgatgttccccttcctgtgtccatgtgttctcattgttcaattcccacctatgaatgagaacatgcggtgtttggttttttgtccttgtgacagtttactgagaatgatggtttccagcttcatccatgtctctataaagaacatgaactcatccttttttatggctgcatagtattccatggtgtatatgtgccacattttcttaatccactctatcattgttggacatttgggttggttgcaagtctttgctattgtgaatagttccacaataaacatatgtgtgcatgtgtctttatagcagcatggtttataatcctttgggtatatacccagtaatgggatggctgggtcaaatggtatttctagttctagatccctgaggaatcgccacaccgacttccacaatggttgaactagtttacagtcccaccaacagtgttaaagtgttcctatttctccacatcctctccagtacctgttgtttcctggctttttaatgatcaccattctaactggtgtgagatggtatctcattgtggttttgatttgcatttctctgatggccagtgatggtgagcattttttcatgtgtctttcggctgcataaatgtcttcttttgagaagtgtctgttcatatcttttgcccactttttgatggggttgtttgtttttttcttgtaaatttgtttgagttccttgtaggttctggatattagccctttgtcagatgagtagattgcaaaaattttctcccattctgtaggttgcctgttcactctgatggtagttttttttgctgtgcagaagctctttagtttaattagatcccatatgtcaattttggcttttgttgccattgcttttggtgttttagacatgaagtcctcgcccatgcctatgtcctgaatggtattgtctatgttttcttctaggatttttatggttttaggtctaacgtttaagtctttaatccatcttgaattaatttttgtataagatgtaaggaagggatacagtttcagctttctacatatggctagccagttttcccagcaccgtttattaaataggggatcctttccccatttcttgtttttgtcaggtttgtcaaagatcagatagttgtaggtacgtggcattatttctgaggcctctgttctgttccattggtctatatctctgttttggtaccagtaccatgctgttttggttactttagccttatagtatagtttgaagtcaggtagcatgatgcctccagctttgttcttttggtttaggattgacttggcaatgcgggctcttttttggttccatatgaacttgaaagtagttttttccaattctgtgaagaaagtcattggtagcttgatggggatggcatggaatctataaattaccttgggcagtatggccattttcacgatattgattcttcctacccatgagcatggaatgttcttctgtttgtttgtatcctcttttatttcattgagcactggtttgtagttctccttgaagaggtccttcccatcccttgtaagttggattcctaggtattttattctttttgaagcaattgtgaatgggagttcactcatgatttggctgtttgtctgttattggtgtataagaatgcttgtgatttttgcacattgattttgtatcctgagactttgctgaagttgcctatcagcttaaggagataatttaaatgactttctttgctatagtagtaattaaggcttagtgatccacagagtctttcaaccattggaaataagagcaaacacattgaaatttgggacaaatatttcactaacacttttcatcctaaaacttgaaatgaaagcaactgataaagacaataagcctactaaagaaacatgccatggaactagctgtaggtagatggacaagggttgagagggaaggcaatcagatggctagagtggtaagttttcaaaatattggcattcacctttcttagcttcctcactgctgcttagtggagtattttttggcagataatttctctgcatttttatgtgtttaatgagaaacatctttatattttgaagatgattgagatagtttctctttgagggctattttatctgtgctccaaaacccaaatagaagcttttagctgattaatgtgaatattgaaagcataaatacaaattaaacttctctccctctgtgtctcttaacccaatctttctgtttaactaacaaaataagcaaaaacagcacacgtatttttatttagaaacattatcaaaattaaggcaagagttccaaatgccagctgtgccatgaactgtaagtaatttctggaacaattattagaaaaaataattttgtttaataaattacttgagaggctcagaatatgtctcttatgactttacatatttacataaatgagaagtactaaaattgaagtcattaaaagatgtttatttacttcagaactctacaccaataatttacttgattccaccgaacgcagtctgttctccctgcccttaggtaatgacatgtatgctaatcgctcatttcgctggaacatttaaaaaatgtattttagattgctttagaaactcaatttataacttcttcagatgctcaaagccaagtgcaggactgtaatacatctttaagagacagcggcgtttttgtgaaaataactaaaagatcagtaaatagaaaacagaaaacattgaagacatttcaattctttcacttaaggaagaaatatttacactgtcaaatgtccctgaaaggcattgaggagatttacatagaacgtcaaatatttctgattatgaaatgggttatttttaaagtggtctttctcttttgtagcagaattattagtagaggcagtgctggtatcaatggtagcaatgtctattgagagcttactagataccaagcactgtactaaatgctgtgcaagatttctcatttaattgactcttcccttgctgaaatcctgaagttcattttatttgtattatacagataaggaaactgagtcttagataagttcatttgttaaaggtcacaaagctagagggttactgagctgaaactacagcagccaagcctgtaaatgttacttaaattttctgagtcttaaatttgttttcctaggtagaataaaaatgataagaccgatctctgataatgcttattattactaaatgaggtaacaaatgtgaagatacacaacacatgtttaataaatgttacttatcctccttaattagctatgcacatgtcaccaaaacgctgccatctatgacattacatttaaattatgtgtatatcctattactaaactatgagctctgagatgatttggatggaaccatgttttagtcctccagtatctccttatctattaccacatacacaccccagtacgttgtaagcatgcaatcgatgttgactattaaaaaatgaatgggggagagcgcaaggaatgcacccatgtgatattggttggaaggcagttggacaatatagtttagattttgaaatgtgcttactctttggtttaacaattccacttctaaaaaggatggggcttgtgaactaagatatatttcacctatagtcatcacaacattgtcttcaatatgggaaagtcaaaaacatcctaattgtcaatttaaaaattgtaacaggccaaccatggaatagtatgaagtcattaaatgatgtgcaaatgcacttagtggtgagagagtctccatttgagggtagagggtagggggagcgagagaagcagaaaaagtaactattgggtactagatttaatacctggatttgttgtcattatttcacctgtacaacacccatgacacgagtttacctatttatgaaaccttcacatgtaccctctaacctaaaagtttaaaaaagatatatttgttaatatgtgaaaagggatgtgatataaatatatgatcatcttcctgatacacacatgcacactataaaattaataagtcaaaaaatagttatatctgggtaaaggatcacaagctatctttatttctcacacttttctttattcctttaaaatattttgtagaaagtatgtatatcttaatctgcagaaaaaagtaagttactttaagagatgaatggcatcattctcaataattgggtttttgacataaggcttcagcaatggatggtattaggtttttaaaatattgagcaagccataccttaaaagaatcatttggtattaggaaattatttaaagcaatgccttttaggctattagcaacttttttttacttcgttaataattaaatataggaggctttaagtcgtttctcagattacttctttttctaccctttgtgtttacatgaggttaaacatctagaactttgagatagaagatttgtttgtgttgtttgatgacggggaaagattcgggatgtgtgtctttgtccattcaggctactataataagttaccatagactgggtggcttaaacacacagaaatttatttctcatagttccagaggcttggaagtccaagtcaacgcattggcagatttggggtctggtgacggactgttgcttggttcatacgtgactccttctcactgtgtccttatatggtgaaaggggtcaggcagttctctggggctccttctttttttctttttcttttttctttttttggtgacagagtctcactctgtcaccaggctggagtgtagtggcacaatctcggctcactgcaacctctgcctcccgagttcaaatgattctcctgcctcagcctcccaagtaactgggaccacaggtgcgtgccacgacgctcagctaatttttgtatttttagtagagatgtggtttcaccacgttggccaagatggtctcgatctcctgacctcgtgatctgctcatcttggcctcccagtggggcctcttcttaaagggcactaatgccaattttaaagcctcttccctcttgatctaatcatctcccaatggccccaactcctaacatggtcacattggtgtttgggtttcaacataaacattttggagggatacaaacacccagaccacagcaaaatgtttgaaaaccttctgttagataaaactacaggaaactccaagatggttcattctatgattttttttaaatgtgagtatacattaatattaaaagggaagatctgtttctatgtcagagaaatatcaacaagggaacacttggttctaagcaggttgtctgtaagcctactgtaggaagaagttattttatgaaaagtaaaacaataaaaataaaactttcatgttctatcttgggagagagaggtatcttgacaactgctgtttgtcacagtagacagaatgagattcagaatggcagacccaagaagaggggcaataaatatagaaaaaactacatatgacatgtgagtatatgaggaaatgtgattctggagatcaaaagtgaaatcagaatatgagatttcaggaaatctagccatcttgaggtagctatagaataatttttaagcatccatttttaattttcatgagtcttaaatgattacaaatgagcctctactagcaaaggtctgggaaaaattggacatgattgccctgccatgattgccctgccttgtccatgattgtccttaaagagaatttctttcctggtttattgttgtctcttatgatctttgcagttgagtattcctaaatgaggtgaagcaactagaacacagaaggactgaatatggcttggaagaactttgtaacaatggtggttatctactacgtaattacagttttcttgtgattgcagcttttataaaatgtatttctctcacagaaagacattttatatagagaataccaaacttagttttgggcattagacctaaattctatactgaagaccaccgggtctctttcattatgtgaaataaatgagatttagcgcccagtagggtctgtgattattcaactctactaaaagttgctcgagactttgattttgcagaacacattaatattaattttgttacttgaacatttgcttttcatataacagaatccacatgcttggttaaggccaacatatgctgtttattatgcaggtttatctgttcctgatgatacagcacataaatcaaatctaaattaaaccaataccacttttcccctatgccatgatatttggggacaatattgttggctaaggaatcatgagaaaatgaaatacttttgcttgttgaacaggacacagtatatttagaatttttttgggagatactcctattgacctcaataataacaccattattgaacaggaattttaggtattcccattgtaagtcctgctgttgatgcagttattttgcttagcttttaaaatttttctagtagttacatatgatcttccaagccaatgaaatttaaaaaattaaattggcttagtgggactatgactttttgcttatttggttggtttttaaatctgggaaagagagtatgacattaatcatatactgcacatgtttgaaaaagtttggggcactgatttttgttctttttgtcttcagtggaataaaatgttggtgcaacaacattcagataaatgttgggtaatttcttatttgaaaacggtttattaaactacagcatggaaggaatatggagagacatctttgttaatggtttttaaaattgtctttattaccaaaccccttattttcatattgagctgtactgaagaaagcatttttgtgataattttttgtgtttccataccctttattcaatgaggaaatatttatcaagctcgtaaacacaatacactttgaattggcgactgtaagcctaatcccaaggctctcaaactcccatcataaagatagacatattggcacaactaacttgtcaaatagatcagtacatctaagactcagctcacatattaccccctctggacagctttcatctattcattgagtttgttttattcatttgcctgtttgtttccttccagagctagaagttatcttccctgcctgtcaactgtcatggcagtttttatctctaagctttggttgcaaggaacagattcattcaattcacctcaaagtaaaggcaagattcttacaagatttctaagggtttggaagtggaatctcctcaggactagaacaggcgctctagctcgaactgcaactcactctggggctcagtggtctctctacttggcattttcatccctctctctctgctttgcatgatccttggcgacacttgctctacttccctacatcacctcttactgaccccactgctgggtttcttggctctaattcccaatgtaagaccggctactttactttccatgccagctcccctccaggggttgtggcaagtctatgaaatgctttctgacatttgtcctgtagtttccactcatagctggcacttggataagcaagacatgatgaatattgaatcattctgtgagtgtctaataagtggaaggtgagtttttaaaacacatactaaaaatgaagtgttcaggatttctgtttctactaaagattgtcagaaagctggagaaaggagcatgatactcaaaatgggtttaacaatgcatcaaaaatattgtctcattcttttcaacagaaattaaagtatttctgcctgaataattagcaagataatgtatcaaaagaccatatgttatgaaaatataaaaaaagattcagtgaattctgtttgatcctcatcatatctggcctgtctgtatttgacagcattgaacactcttgtcttctttaccctttattcttagcttctagaataccccgtgccttgtgtctcttcttacccatcccccaactaattccctctcagactcctctgttggcttctcttctcttttctctgtctttttaaaaaacctgcttttcaagtattggtgacattgaggcgattgttcttggatatattctcaactatccaaccaccatgaccaatatccttctctcccatgagattatcagtcaactgtaatcataaaagctatgtttccatcctcaacttctctactaagttccaacttacaggaattttccgtatggtttactggacttttccagctggaaaagtcatatgtaatcctgccttgccaaatccaactatttgtctccacccctctcccttgacactttttctgacttttgtattttttatgtcaatgaacatttccaactagtcacccaagtcacaaagggtgaataattatctccttccttgttctaagtcccggagtaaatcatattgtctagtctactatttttactcattcagggcttgtctccagtctccattccttctgctcttagtttagaacttccttgtatctcccatgactcttttccctatttggggatcattcttctctgttctatagtcctcattgcttccagagtgagttcactagaatataaatatgtcatgctactctttttaaaaaaagccatttttaaaggcttctcaatgcccacagaatcaagctcatactcaacttgatgtcatcaaagatattcagggatcatgttcctcctctctcctttgttcttatccttccctttcacatgcttcttcctgtacctgtacctgtacctgacataaacacataaagtaagaagatctggtttgtatagaagattaaataaaacacaatctttcaacattcttatgaagtctgtgaattaaaattatcactttaaaattttatattaatcccctataaactgtgtaaatattttttacttctgataaaacacataagattatttttagtaaagattgccataatacctggcttagcaatagaaggagtaacatatatttttggttttgaatcaattaaatgacaaataaaatatgctactgtgtgacttatgaccaataaaaggtgtaaattgtgtaacttgaacctatgatatcttaatttatgatatagtcatattagcaatggattggcatttttttggttgctcagaaaaagcaagaacaggccaggcgtggtggctcacacctgtaaccccagcactttgggaggctgaggcaggcagatcacctgaggtcaggagttcgcgaccagcctggccaacgtggtgaaaccctgtctctactaaaaatacaaaaattaaccaggagtggtggtgggcacctataatcccaactgcttgggaagctgaggcaggagaattgcttgaacccgggaggtggaggttgcagttagccgagatcataccactgcactccagtctgggtgacagagcaagactctgtctcaaaaaaaaaaaaaaaaaaaacaggaatatatcatacatttaggaaaataaatggagtccgacgtttcagtgctccttctcctgagtgatttcagagactatttgggaacatgatttactgacatatgacgtggactgtaagaagaatctgtatagaaaagtggggttggctgagaaaaatggttactttcttcagtgtgaagagttttgaactagataatttgtaggaaaggtcagaaattcaattttggctgcttaaaaatgcctttgttctgtttcaattgcatcatcaaaatatgatttttctcccctatcatataagttctgtatgactagttggacagaatgattgttaaaatttaccaaactaattttaaggtttctagtcgatttgatatcatgttccttgtataatcaataaactttagatgattggtgttcttctaaagtcaacatcgtataagaaataataaattccttcctggaagaatatactcagaccatataaaacaatcactgaaattattttaatgagaaaaggtaaatattttcaacatgtttatttcagtaggcataaaaatgaattggccaatttaaataagtataatttatcaagttaactgtgtaaaacccacaaaaaagttaaacaactaaagatactactctatttaataaaataggtctatctatgaaagtctgtcttttgaaagagattactataagacaagatataataaaaatgtaaagaagacataatagaacaatgtcctcctttctcttgttttttgtttgttttcattttatatatctcctttgtgtatcatgatgtatatattaagactggttgctctttcttatttttatttcctggaaagactttgtttgttttgtgtgtctctgaattctgaagagtgttgttatttttttctgtcactctttcttaaatcggttttcccataaaattcattcagagaaataaaatgcaagcagctctttctaatactatgccttaggaggaaatattactctatgtgacttcaaaatttggtctagtctattccaaaggcttaaacagaaaatgtaagtagatacatggaagatacatatggcactgcattagctcacaactataacatgttttggtcatgtgtattggtttcctattgttgccattacaaatgaccacaaaccccagtgtaattatcaggttcttaactacttatgtcacactgttagaatgaccatggattaacatggattagtttgtcacaatatgtatggttttctggaattgtagaatattaggatcagtgccatgtatagaagaatacttgcttctttgagaagtaggagctgtctgtccatttctggtccagggactaaaagggaaactaatgagggaggactgactataaaggtaacataatgtagtgattaattttgtcctagcctagggcctaacgtgtgaggaattatatggtctatttgtagaactatacatagaacacttgatcgtgcttctcagaataagacaaaggcctctaggaagaggtatttgcttcctcattttctagatcttaatttaagcaagccaaggagtcagtgagatgtccccacaggatccgatggttagtgggaacaccgtttaacaccaaatcatcaaattgtagaagtttgatgctagaaaggatcttgaaagaccatgttctctaccatttttaacatgacagagtgtatacattagataaggaaaataaaaaaaaggtgccgagggtccatctactcattataatgggcacagaacagcaaaactacaggtggactgttctccacctcctacctcctcacaagttgctaacttgtaggttagaactgtacttggaaacaggctgtatataatacttacatataattgtattcaactagctattaaacatatataaataatttttatgtttttctcaccacatagctttataattcttttttttttttcctttttgagacgcactgtcgctctgtcgcccaggctggagtgcagtagcgtgatctcggctcactgcaagctccacctcccaggttcacgccattctcctgcctcagcctcccgagtagctgggattacaggcgcccgccaccacgccgggctaattttttgtattttttagtagagatggggtttcatcgtgttagccagtatggtctcgatctcctgacctcgtgatctgcccgcctcggcctcccaaagtgctaggatgacaggcatgagccaccgcgcccggccatagttttataattctgaactggagtagccaaagtcttccttttctgtccttctattcctttctccaccactaatttgtgtgatttggtctgagctgaacgagtgcttttggctctaagaccctagttactgataacagaattttctcagtttttgctcatgcatttccccaaagtacagcttggaaaatcaagtcctgaccagcgaatagccttgaggttgggctaatatgttcaatgagtattgtggctcttctctactgaagttctctgcctttctgtctatggtgcacagtgtctacacccatgctctctctggatgctttagtgtcatgatgggtttggtgttccagggtgtctgggtcacttctcacttgaaaaataaattgaaaacatcctttcgccactctgaagtgtgatgctactttccacgttttatctttaaaatttgttctaaaagaatggctgggccgggcgcggtggctcacgcctgtcatcccagcactttgggaggccgaggtgggcggaacacgaggtcaggagatcgagaccatcctgggtaacatggtgaaaccccatctctactaaaaatacaaaaaaatagctgggcatggcggcgggcgcctgtagtcccagctactcaggaggctgaggcaggagaatggtgtgaacccgggaggcggagcttgcagtgagccgagattgtgccactgcactccagcctgggcggcagagcgagacgccgtctcaaaaaaaaaaaaaaagaatggctgaggggtgatgacatttaatcaatgtatatccaatagtgggggaactacacatgtgcaacatacagaagaatgaaattcagaaaaacaagcagattaaaaaatatacactcactacccaaacacattttggtatgcagacttttgccatattttttaagaagtttgatttggctgtgatcttactactttcgtgcatttttgttttttccacttataacacatatatctattcctcatattttaaatattgtctccttattattccacaaagtcaacttttcataacatatgtggtaatctttctaaagagttcgaggagttgtttctgctaattttactgtaataaacaactttgtgcattgtcttcccagccttcatatttaagataattccttagaactattgtcagaatctatgtggtagtttgcaaaattggccagatttttccatacttcctgcacttacgcccctttgcaatgtcattgagaaatttttcccatcaagagtgaagcctgtttctccactacttgaatcagaacttgtgactcgattttaccaataaaatgcagcagaagccatattcagtggctcacatctgtaatcccagtactttgggaagccaaggtgggaggattgcttgaggccaggaatttgagaccagcctgggcaacacaggaagacactgtctctacaaaaatctttttaaaaaatatccaggcatggtggctcatgcctgtagtcccagctactagggaggctgaggcaggaggatcacttgagtccaagagtttgaggctgtagtgagctatgactgtaccaatacactccagccctggtggaaaagtgagaccctgtctttaaaaaattaaataaaataaacagagcaggaatgccaactgtgctagttccaaacctaggtcttaagaggtcttgcagcttctgctctgattcttgggctccttccagctagaggttcagaactcatttgcccctgtcactccagctgattgtcagccaattgcagaagcagggctgccttcgtgattgacacgtgatacaagtgcacaagtgagcccagcatgaccagaaccactcagttaaaactataataataaattgttgtcattttatttaagttttgaagtggttttcacagcaaaaccaactgatacaacctatttggccaaaaagaataaatatatttaagccttataatttgtattgatgagttgtttcccaaaaccgtggtaaaaaattgccctatcaatagttttgctgccttcatcagccaggcttatatcattgtaaatttttgctagtttgataaaagataattagtattttgttttaattttaagtgcaacattttaaaacccagtttcttcttaccccaatgaaatagttactaatttgatgtcatttcattaaaacaagtcacattttgctgtgaatctttttccaaattattttcctagaattaatataatatttgtcaggtttatttcctcttagaagatatagagattgcagcacagattttaatttttaatttgctaaataattctttataaagtctaagttgtgacccttttcccagatatttttaattcaataactatcaaatttatgaaaatgaagttggttttattaaagtttctactgacatcatcttactgcattggatgttgatctcagtgattgcgactattctaagttgttaaaagccatgtaatcattattggctcacaagcaagcaaatgaggtaattgtattcaaattggaaaatttgcttctaggtaaagtgtatgcacagaaaatatagacaaagtattggccattatacttgacagactttgaagtgttgccatcacccaatgagttttcattgcatacagaatgaaagaaaaattacatcatttatgttgtctttggccgtaggtaacagaaaacccacttaaacagcactaaattatgagactcattggttggactgatggttaaccaattcatatctggataggaagagtagtttttaaaaacttgaaatactttttcactgattgctaaaaaaaaaaaagaataatagtaacttcaataagtagtaaaattaataaaaagaaattagtaaataaaattgcacctgctgcctgtggccacaagaactcagtgatatatattaataaaatttatttagcttatggttttatgagattcaggtattttcgtgtgagctcagctaatctcagctgggtttgtttctgtggctgctgttagatacatgccagctaaggtgtctttcctgatttggctggccttgctcacatatgttggggctggcactggctttgataactggagtaattcaactctgctccacctgtctcaccttgtagaaagttagtccaagtatgttctcatagtaaaggcagaggagcaagcacatgcctagtcatacatgtgtttttcaagcctctgcttggacacgcttactaatattccatttgtcaggtcactttgtgggtcccagagacaaagtggatggcactgcaaaggtacatgccccaaacacacagatgaatggagtggtgaagtggtaagatcattgataacaatcaagctacaataaacttactgattcaagtgaattgtcataggatgctattgataaatagtcctctacttggaatgagatccaaaacattagcagttccactcacctggtgtaatcatgtcatggtaagaagcatatgcattctctaaaaagtgttctatgttttaggagaatcaacattttcatcatcctttagttaaacaagcgccattgtttggaactacacatactcataggaatttattgggataattgagagtttgaatagcaatagatgcctatgtaataaacatgaatctttagaatttgtgagagcacagcaaaaatataatgaaataaaataataaactgcctactgggccatcttctgatgctaggtaaaaatcagaaagtggaatatgttttgataatgtcaagaattaatataaaatataacaaatcattttcatttattgaataaaaacaattatttcaacaaatgtataagtagcttaccattgcttttaagcattaaaattgcttaaactttgtgtcaataatagatgaaagtgcttaacacatgtatttcattagtatgttgatcatgttccattaaagctcatagttgtaatgaggaaaatttgcaaacatcaaacagggaaaattggcaaacatcaaagaggaaaattggcctcgcatggtggtatgcatctgtagtcctggaggctgaggcagtaggaccacttgagcccaagggttcagtgcactgtgatcgcacctgtgaatagccactatactccagcctgggcaacatagcaagcccctgtctttaaattaaaaagaataaagaaggggtggatcatcaatcctttcaattcaaatgaaattgaaattatcaattccatttcatatatcacatcaatcactttcacataataacgcatttgaaataatatcagctttcaaaccttttttaaagaatatcaataaagaatataaaaatttagaaagtaccatccaaacttcattttacattagaaatactcaagcatttctagatataaaatattaatagtgcataacaaaataatattatgtgcatattattatagtccagatttatgtatgactcacttggaaacatacttttggaaacagtttatgaaactttcccacttttggaaaaatgtgtgtataaagactagaatttcaattatcactgatgaagcttcaattatttcacgtaaaagtgattaataattcacttaaaatgtgaaattcaagactgaaaatagttttatgtcttcttattcatcatggaactagaagaaataccagaaataataatatatcaatctttattttctttattcaagacaagtaattggcaaatatttgcataaaaatcttatgatatattttcatgtagttgtgttaacaaaatctgaaggacaggttggagtttaggctaaactgtcataaaagtttttggatatttttatttagtaccacattgttatattcaattatttctgggtgaggtgatagaagatgtaaataaaattaaattcctttcttgatggattttatactattatcatatattagataaacattagaattaaatgatatactaactggctgggggaattgacctaatgaaaattgagtcatatacctctatttatagcctgattcactagaatagcaaacacagtttggaaattttatcaaatgttgaatattcaatagaaattgtgaagtggaaataattaagaaattggaaagtggacttttaaaaaaagatttgggtttaaattattatagttttatagctttcactactttaacttgaaaaatttttgttaaagctggcagattaatgcatgataaaagtgattaagcttataaaactaaataatgctgtgaaagagaagatgtagaaataaaggcatatgatttaacagttgaggcaaaatagttataataaaaagactgttacatacacttaaattacgtaaaactgatatcacaaatgaaatatttaataaattttatgacctttcaatttattggatcctgacatttttccaagtaatattaggtagatttatagttttaagattaacataccaataaaattaggctaagtaattaaatatgatattctaataaatatcttatgaattagtagtacatgaatttaatatgtaaaaatcagagtattataaaaactagaaacattttggatataatttttggtagtttaccagacatgtagagaagatccagtataattaattacattttgtgtgtgaagaaaaattccctacctgtttagactatattacataataactaacatttttatgaggaatttttggaaggagttgatatagtttcttatgtcaaatcatgactcaaaaagagacattatttagctagaggcagtcacatcaaagaaaagatcataacactctaaacatcaagaagcaatttagaagttattagaatgatttgatgagtgatatgtactgtaagttatctataagttacagcatacatcacttaataaagtttcaggctgggcacggtggctgaggcaagcactctgggagactgaggcaagcagatagcttgagctcaggagtttgagaccagactggccaacatgatgaaaccctgtctccacacaaaatacaaaagttagtcgggcgtggtggcacggacctatggtcccagctacttgggaggctgaggtgggaggattgtttgagcctgggatgtgcaggttgcagtgagctgagaccacgacactgcactccagctcaggtgacaaagtaagactttgtctcaaaaaggaaagtttcattacatatatgtacacatatatgagtagtttattatatattggcttatatgtacatatataacatactatacaagttgtttcatactcttaatatcactcagcttattggcccctgtacctggagtccagagacaggaagggacttggggcaggctcaagccggcatttccacctgtttctctctaacccctttggttccgctcttctccgtacggacttagttctttagcagaagagttccatattggtggcaaaatggttgaagcaatcccaggggtcatccttatgtcatgacgagcaaagaaagattatctcctagcagctttctgtccagagcagttaaacttcatccccataactttgcaagaaaccgtcgcatcttgcatcttgttccagactgaatcgtgtgcatgttctaaatcttgtctctgtggtcaaggaatatcacacacagtctggtataggctgatttcttgaacaactccttgctcagtcgatggtatgctcccaggcctgacaggtgcagccctgaagtctaggtgatgcaatgaaaggggagttgagtctggcctctggtcacatccagggcaaacaccctgagttaacatgcaatacctactgtggcccactatcagcctgaacttctagctgcaacccttgctgctatattgcctgcacgttaaaccccgaatcactctgaaccaagtattgttcactgaatcaacacagtagaataaagcctgtaaacccctttttcttcatcacctcaatctggaatgttttctacttccagtgcatcaaaatcctattgcccccttttgtcacaaagttgactttctttgtgatctgagactgtatgacataaaacaacagattgaccctttagttacaaaaagttaagtaattcattattcattgtcttggaaagagtgaagatcatttgaatctgcaaggatggtatgaaattgcttggtttattaatgtaaattgaattgagatttaattttggttgtttccttgagaaagcagaaaaatggttttcctactaaatgagtatttcctactaagtgagggaaatttagattggatcacgtgtgcctaacatgggctgttaaatgaggaacacctagagctttgagaaatatacggtgaaatgttaggattttttttttttttttgaaatttcacttgaccgagatatggggcctggggagagtataaggaaagggctgtgtcctctcctagaatgaattaactaggagtgggtcacggagctgtttctggacatagtgcagtccatgttattgtctgatattcagattattcacagtaattttttttaattaataaccttcttaactatatataattttttatcctttccttcctatacacacaacacctaatatggtgttccacttttccttttccccatataattggacaaaaccacgttgcctctgattcttcaatattgggtgaaattcagtcctccaattttactccaggtttggaaggacgagagacaggaatccagtttcaagggactaaatgcagggccgaccaaagcctcggaggccctccctctattaagtatcttctctgttacccagttctccagcagttaactggttaacttgttaagatgtaaatctaaaagaatccctgggaaaatggaacagtgcgaatctagggttctaaaatttgtattagcaaagggtctaaaactcctttgtttacattgtcttaattattaaagaatccaatagcattaaacagcttgagagaatgtttgcccaggggaagtctatatttttggcaagcaataaaatgttgaatataaatgaaagctatcctgaatcctggcatatgtgtctctactatgttatttgcttccagattttttccaaatggatacttttaaacatatttatcagaatactaaacttatgcatctcattttttaaatatgtcttaaaattttccccttagttgctagggtcttcataattattattaaatataatcaattttccaagaaacactctccagttttgtactgcctaaacaaccttgcattgtgatcttttctccttttgaatgtattttcttggactacatttccagaaatagaattactgaataaatggtttggaaatatttacagctcataatatgaaatgccaaagtttttcaaaaaagagtttaaaacaatttctatctcataatatagtatgtatatcagttttggttatactccactattatgcattacatttaattatactttctttagtctttgtattttactgtcccacttccagactcaaagaagatcatagcctcctggagaactaggagagtgtatttattacttttgtatttatttacttctctataacattagaacaaggactaacacatactaagtaaacattaaatgtttgttgcattgatttgaattaatcacgggaattctttttgcagttacagtaactgccaaattacttcatgttttggtgaattactttattatgattttagctttttttcattaactgagactcgtgttcctctttttagtgcttttttgtttttaatgaaatgcttcatgattttctgtgtcatccttaaaagaggacatgtttattttctctggattgtgccaattttaagatattttctgccaaagcatgcatcatttaatttaattttactctttcagtaagcaattatatgactgagtttacagttagtatttgagatacaattgaggttaaacatttttaatgtgtgtttattaaaatgatattctttatttagtgagttgtttgctcttgagtttgcccatttgaatctggagttttatttgtaaaataattataattaaattttaaacttttcctattacattttgctctagatgttttttagcttttttcaatttttgtttatggctaaaattcagaaatttcaaaattttatagtctcatttgttttgaggggagcagatacctctttctcttagatagttcaaaggttattgactactacttagcactgccacaataggctaaatgtccagttttattctatttgaggcattctggatattattaatgctttgtatcatgatatattgcacttttagagtgtatttagggatgggatattattagtttgagtagtccgcttagattttttttaaactgggaaaacaattatctattcatatattaattaaaaacattttattttgatgtatgggtcagtttttagttttttctacttttcaatatgatgtaatatgttgatttttgtaccatactctttcacctattgattgttcagcatatattttaatatttgctaagcctagtttctcccttgtttgagactattctgaaatattttttattaattaattatccaaataaaatttgtcacctgaaggctatagtccaaaaaagagcttataattttatttgggattttattaaacgttcatattactttgggaaggtccaaaattatatatgactgtttttccatccaggagcatgattatgtgtttctacttattagagaataaatttctttccaataaagctttataatttttgtaaagtatgtcctatatctctcatctatgttttcaagttaagattgccactttaattactattgtgatgagatactttttaaatttttttttatttttttgagacagcatctcactctgtcacccaggctagagttcagtggcagatgtctgctcactgcacccccacctccccagttcaagtgattctcatgcctcagcctcccgagtagctggaattacagtcacgtaccaacccaccatgcccacctattatttatttatttatttattttagtagacagggttttatcaggttggccaggctggtctcaaactcctgacctcaagtgatccacctgtctcagcctcccaatgtgttgggattacagatgtgagccacagcacaaggcctaatttttttatttttttaaggcaaggtcttaccctgtcgcccaggttggagtgaagtggtatgatctcagctcactgcaacctccgcctcctgggctcaagcgatcctcccacctcagtcccccaagtagtttggaccacaggctctcaccaccaggcccagctaatttttttttgtagaaatggggttttgccatgttgcccaggatggtctcgaactcctgagctcaagcgatcctcccacctcagtttaccaaagtcctgggattatccgcatgagccactgagcccagcctgagtgttattattatttttttagtgttatattgttatcctgtctcattcatatatttgattacatgtaatagctcgatttcttgaaaatgatatgcatcttcttttcctgtaggtataaaatttcctttcagtatatgttaacagttgcttcagggtagacactatcatgacaagttatcatgagaatgtccttccattgaacaattgtgggatttttgagctaaatttgctaggtcataatagattagcctatcattctattcaatctcatataccattttttaaagatctgcaatgaagcagaaggcaaagtagctacaatgaagttagaggtttgctcaaatatttcatggccttaagccaaaatgcttatgggaactctgtctgctgcggcaatgcctactgacttcttgcatttcctgaagggtggttagaaagggatgcccatcatttcttgtgggttggtcagatttcccaacacttcctacctgatgtaggtgtctgggtatggttggggtttggaggaatgttctcatgatctaacagtcagactttcacttatttccctttgtgccatccagcttcttgtcttttttttatcagcggtttctctatgctatggcacagcttatctagaactctcaaagctgaaaaaattttgttgcacagactaaaacaggaagctggggttcgaatacttttgtttcagactttttaaagcaatcttcctgttttatgccttcacctccccacatccctactccctgtcctctggagatagtggttacgttcgattcctgagcctttctggagttttatggcacaaatggacttatttatcctggcttctttccaagaattcacttacctatctgttactattattctatccataagtcagctttcaaaattttattggtctcattagagtgcttttgttttctcatcttatttgtccttgtgggctaatgattttatttttttaaactatctgagtgtcattttagtcaggtttggggagggagcagaggtgcacatgtctgccatgttttttaggaagtctctgtcatgatatatttttatactgtctgcagtggacagagccaatgaactccctggcatcagtttttctgtactcattgttaacaagacatcagattaccaactatgtgattttggaggagtaagctgttattaacccaaactaatcatcatcattgtaggcgaagaaggtgaaatgttttccagctcttggctttatttttccttgtggagggacctcaggtggaataatgctccccacttctcactcagtcctccttaaggaaaaggaatgacatctgattatgaggtagaaaaataaagtaagtgttctccagtcagtcccatttcttcttattaggttttctcccctctgcaaggcagcttggaataaactcagtggtacaggctttgtctcgatgagggtctccagacatctatagttgaaatgtgagcaaattcatttggccatgagctaaaccatgtttcctatccagccagtcagtaaaaaggcttacatctccataggtccatcccctgtgttttatttttcacttgtttctaaacttgggcaggaaagaaaaagctattatatatctactttcatctccacccttgaaacaaataaacaaaacccagaccagcaagttaatcctattcctcatgcagcaatatttggtttaacagtggacatggagtctgggtctaagccattagtgcttaacattcctctgacaatggcgatcggttcagggttgggcagcatctatgttgcttctgcaaagtaaagaccatgactttcctttgattttttaaacatcaaaacatgtttattctttctctggatggttttgtgagaagccattatactgggaaaaactgcagcaattttgcacccatgacaaacccagcaagcacatgaaggacaaattctccttggaggaagagcagaggatggagacagaacccggatagaattccatgtgaagtctacactactcctagacttttcatttgtgtggtgtattagtctgttctatgctgttaataaagacacatccaagactgggcagtttataacggaaagaggtttaattaactcacagctctgcagggctggggcagcctcaggaaacttacaatcatggtggaaagggaagcaaacatgtccttcttcacatggtggcagcaaggagaagaatgagggcccagcaaagggggaagccctgtataaaaccatcatctctcatgagaactaattcactatcacaagaacaagacaggggaaaccacccccatgattcaattttctctacctggtccctcccgcaacatgtggggattatgagaactacaattcaagatgagatttgggtggggacacagccaaacaatatcatgtgggttaacacatttctttctatgtttaaactcacttgaagtgggtttcttaccattaagagcatctaatcactgcattattgagtttgcttttctaggatttctgtaaaattgtcacattttaattacaaatgagtttccaaacagtgtttctcagaacataagcgttatgcctagtctgctcaagcaaaatctctgctcttgggttcagatttactttcacaagtcaaaattggtttcatcctggattaagtttacctagccttaagacaggatacatggtaggccacatggcatgaatggcaacaacgaatcagaggaattaggagacttacttcattgctaaaatggacatagtctcaggagatgagacaagatgagcatgagccacctcagttcatggaagctgcatgctctggtggccctgtcagcttttacaccttgtaagattcataacattctcctcatattcacatgactggccctcattctccagtacagtagaatttcactgatacttgttactcagtaaacaatttcagcaatgaggatcaaatgtatggtctggaatgtagtaacaacagatgaattctctataatctagggtctagtctgctcctgtgactcctttaattaatatgcaagaaagattttaagaataccaaatcctatcaatgaagtaagtctcttaattcctctgatttgttgttgccattcatgcaatgtggcctatcatgtatcctgtcttaaagctaagtaaacttagtccaggctgaaacctattttgacttgtaaaagtcaatctgaactcaagagcagagactctgtttgagcagactaggcatggcactaatgttctgggaaacactgatcggaaactcaacttgtaagtaaaaatgtaacaagtctacaaaaatcctagaaaagctaacccaaatcctcagctatctctgaggctaacggttaaattatggacctacttttaactctattctaaattagtatcctgtgaatatggacaacaagaacaataatatatgtcagttatttaagtgacaccaattaaagtgctttgcatattattgtgtaataaataatttggctggccttttttcccagttcccgggagttatcttttaaagccttagaattccctgagtgacaggagagtttttgctattcatagtatgttctgataggttatgccaatgaggcgactcatggtgagctcatagatagtttatgctaacaagatgactcaggatggtgttgaccaatccagagagactagccatgtttttagagggttggaacttcgaaccatgtgatattagcctgacctccagggaggggagtaggaactggagatcaagttcaatcacatggccagtaattcaatatatcatgcccacaaaatagaactccaataaaaacttagacactgaagctcatatgagtttccttgggtaacaatgtgtattgttacacaacaatgattgaaaggtgatgtgtcctgactctgcagggagagaggacatcagaagctacacatttgggaccttctcaggcttcaccctatgcacctctttttgctgatcctgatttgtattatttgtgctataataacactgtaattatatgtataggactttcctgaattctctgtcactgtcagtctattaaatgattgagcatgaagagagagtaggaacccctgagtatttagcttgttggtcagaagtgctggtggccttggaactcataagcttgtggctagtttctgaggtgagtgagaggtcttgtgaaggactgtgccctcagcctgtgaagtctgcctaactctggctagtccatcgcaagtcactgcacacgtattaattcaatcagctctatggtgtgagtattttattactctcatcttacatacatagattaataaagattcataaataacattgataaattgctgaatagtacatttcatctcttcgttttataggttatataataaatttattttcatattctctcagaatttttacaacaaaagaattatctgaattttttccttatgtgtcttttagaaatttaagttgtattgctgagtacattttacttcctttggtagaaacatttttatcttactttaagttctgggatatcacttccttttttaatttgctgtgtaattttttctaagtccaaaattgtttggaagatttcaaaggaatacagtggaatacatttaaaggctgccagacctcaattcaaaagctaatgattatgttaaaccaatttacaattctttggagcttcaatttcctcatttctgaaaatagagataattatacatatatagaataatgctatgaagaggtacgagataacatatgtaataaatccggaaaatatattaggtcaatttcccctttagattcaaacagcctcagggtaagggcaagcaatctacatatttttattagtataattcttttagggatgataaagttatagaaagacattcactcttctttcttctcttccttgggggttaatttttcagtgtttgatataatctcagagcagtgtatgtcagcgtatggggatggggcaggggagagagagagagagaactcttattttaaaataatttcctaacaagagagcttttgtaaataccagcctaaattgttattaatgagactttcttatttccaaaagccttctgaagaatgttgtggtggtcatggattcacaggtctccatttatagaaagcagagctaactaaggcacgcaaaatgtgttgccatgtttaggatgaggccacacttcctatgtgttgctcccagccaatgactgagcacaacaagtctactaagtcagtcagcttccctggagaaaggggactctttgatggccattttgcttgaattctccattcttaatctgtggttgcttttttctcttttagcttactatggaaatggaaaagaactgctgctttgaaagttgatatttaagtaattgggaaaaatttgagaacatttatctttgaaatcctttgaaactatattatctaaggatttagtgtttttatttttgtcagtaagtaaggtctatgtttatgttttggtggggaaatgcagtaacaagcagacagaaaataacccttaatattcctcattctgagttactggcacaagtaaatatttcacatgccatccctttcatatagatatattaatttgtgagctatattaattcttgttatggttaacatgaccctattttctcaccacttctgtcaaattaataaatatacctgaaatttaaatattgttccctctatgtattacaggtttttcccatgatagtggggttggagggtaaaaataacctgtccttatcttttagctaacccaggcacaacaggaatacaaccttttactacagatgtgggattgttcatgtcatctactaatgcaaggtacacagctttttgacggcgttgttctaaaagcagctatttctatagctttaaattacatgcttaaatttatattttgcaacctattaatgtcagaagtaagatagtattaatttcctctacggaattctagataattagcacacttatatttcctcttatcttcccctccttccttcaatgtcataaattttgttaacatgctttaaaatttgtgcctcagttcgtctaattaaaattattatttaccaactgacttttatatagcatatgtcattcagttatgtgaatattggcattttatattataatcattttaaatttttacctttaaaaattaattcaatacctggttgccactgtaaatatttctttttatcacatggtgaggcagacataaaacataaggcataagaaataggtcatagctattgagaagtatctgcaataagtagttgataaggggaacagagctatgggaccaggcatggggtatattagaattctccaaagaaacaaacaaataggagatacatatattgagagatttattatgggaattggttcctgtgattgcatagtccaagaaatctccaaaactgttgtttgcaagctggagaccaggaaagcagtggtataattcaatctcacaccaaaaggccaagaaccaggggagcagatggtataaatcccagttacagtatgaaggcctgacaaccaggtggagagaagtggatgctggtgtaaatcctggagtctgaattcccaaaaaccaggagattcaatgtcggagtttaggagaagatatatgtcctagttcaaggagtgacagggagagaaagaaagaaaaaatagagagagaattcacccatcttctgccttttgttctagttaggtcctcaacaaattggatgatgtctggctacattggagagagtggattctctttactcggtgctaatgctaagcccttccacaaacatcctaacagactgacccaagaataatgtcttagcagttacttgagcatccctcagtgcagtctgaaagatgtgtaccccctccacacctgccaaacccttggaaggttggtgggaaggctggatgactgtctctcccaggtcctatgtaacattcttgttttattcctccgagtttgtgaggggtattagcggaatttgataaaattatctccacttatttaccataaaattaaagtacgttcttgcgaaaaggagttgtgttgcagcttatgttttgtcagttggattcaaattgtgttgtatccgataatttttttttaagtttgtgacatgtggttttaatattatactttcctaaatccaggattgaaggagtttccctttctcttctagcttctatttgatctttttggttcatttttagcgtagagtttgtaagtcgggttcttacatttctcttattcccagaatttcatttcatgaattgcgtggacaactttctgaaacttttgtagcatgacatgtctggataatgacttaacttacctcaaatatcttattggtgttcttattttataatgtcctttttgtgacacagtttgtcttgccttaattgcttattactacttaattgccattactactaattgtccaaatgaataagaatgagaaatgaaaatgaaaaataaatgagaaaaagacatgtgaaatctcttcattcccatactcttatcagcaaaacaatgtttcaggttatctgttccccaacatggaattcttcctaattccctttctgtcaggctgagattatttcttgtgcacataattcctcctgtggtctcattattgctgcaaaatattttaaaatatatgtttcatagcctgaagtattagggaagtgtcaaccaaactgctcctgggaaataaaatgaagtatatttgattttaaatactcttttttaaaaactcttgcttgttctcaagctctagttagttgaaatcagtgtataggcaaaactaactttttttggtctgttttgaaaaccactgtctttttagaatacaacatcatgtaattctgtaggtttaagaaagattaagtataacatagcatttgtatctttatataactaaattctaattattaatactaaagaatggggttgaggagatttcattaagatgagtcaaaacttactcctatttttgtgttgttgttattgcttttgtttttgttttgtgtaactttatcaaccaacagtatgcaccaacctccttttggcaaaacagtgaacattatatctctcttaaatgatagtgctttattatttgaacttttttcaaaagacaacgttattttaacatgacgtaacttaatattactggagagttttcatttttagcagtttcagagcgctttatgttagggttttattaattcccataacacatttataaagaaagccttggaaacagcccttcaccaagaaacggttaccattcagggcttgcttctgtgagaaaacacctcaccgagagtctgaaatgaccagcatttagcaccaatagcctcactcccctctcccacagtaattatttatggatgagcacttaatgtcagtatggctcacaaatttggggtgaggttctagagttgctgtctcacaaaatcttacattttctcattctttgcaatagttttgctatattttctgcaattgttcctataatttctgcaattttgttccttgtattcttatatgttttttaaaatttagtttgtgtaggatttttttctttccaaaccaagtggtttctgacaaagacaacctcaaactcgggtaagaaatcatgtgttgtattcccagccctgtcataaatttgcaataatcttgccataaagaactaggtttttcttgtctctcctccccaagtattattcataactctacagcgttatttcatctatatactctaattttttgatcatctgtcttccttagaagaagcgattattttatttttatcaccttgatatcttcagcatctactattgtggttggctcaataatgtgtgcttgataactttttgttgatcaagaaacaaaccactgactatttggagtacaagtcactttataattcttggatgcagtttgcttagaaggaatcagaatagagaatttctaaagtttcaactactaaaattttaccggccaggcgcggtggctcacgcctgtaatcccagcactttgggaggccgaggcgggcggatcacgaagtcaggagatcgagaccatcctgactaacacggtgaaaccccatctctacttaaaatataaaaaattagctgggtgtggtggcaagcgcctgtagtcccagctactcgggagggctgaggcaggagaatggcgtgaacccgggaggcggagcttgcagtgagcggagatcgcgccactgcactccagcctgggcgacagagcgagactccgtctaaaaaaaaaaaaaaattaccattgatctctagtttcctgtggttgacatggacatttttggttttccttttctgtcttggatgttgttttctgcagctagccctttcttgtcttttgcatgtattaggaaacaaagtctagctttttggatattcttttctttgtttctgtctctccacatatatttatttttagaggcagtgtctatgtttgggcttctataacaaaatgccataaactggatggctcataaacaacagtttttattactcactgttctggagactggacgtttaagatcgaggcattgacagggttggtgtttgaaatgtttcagcatgcagtgctaaggtttaagaattcagtgcttccttttaaagagtcacattggtttgcaattaagtattaggaaatgaagttctaatactgctttgatgtaagctagtgtgcttggcaatttctaaatacattaaaattgatttcagcaagatgataaagatttgtagaaaaaggcaattatgtttgcagtgtcacaaatatctttttattatccttttagtcatttctcctgagtgactaaacgcatttctcctgagtgactcaacgcattggttgagttggtgtttggtgagggcccttttcctggttcgtaggtgggacctctgtgaaagctcttataggagctttctggggcccctttattagggcactaatcccagtcatgagggctccaccctcagaatataatcacctccctaaagccctacctcctaatgccctcccactggggattaggtttcaacatatggacttgaggaggacatgttctatctacatagcaggtgatttttaaaaaatgctatagaggtcctacctttaaaagaatttaataagaccgttattttataggtgattaatacgtgagatacaaaaatgtaaaaacactcatgtactcatcccccagtttccacaattatcaacacgtggctgattggacttcatctctactttactcaatcccccagccctgctgggtaatttaaaagcaagtattaaacatcctatcaattaatctgtaaatattttagtgtgcaactctaaggtttaagaattcagtgcttctctttaaagaataaaattggtttgtaataatttaagtattaaaaatgaatttctgatattgctttgttgtaaactagcgtgcttagcaatttctaaatagaaaaaaactaaaatataattgagtttagcaaagtgacaaatatttgtagaaaaaggcaattatagctaaagtgtagcaaatatctttttgttatccttttagtcacttctcagtttctagtctcttttttcagtgcttggctaagatcagtagagaactgcaactcctctcaaatgctatgcattccatcctagtggtctgagataattctccaaaagttacatcaaaccttaaactttatagcaaatcttactcctacataataacatggattcatgttacactgagcatagtccctaagtattaccctgggaagtcttcatccagctgtttcaaattattttcatttcatacgtcatgttaatagcagggaggagactattgctaatggttttttcttggaaattaatctgtcaacctggtgaaagtataatgtttcagcagataagaagggacccttcagtttaacatcctaagcatattaatacacttagcaaaagcatagcaagattaagtaatcgattagaatttccattaagaatgcggaaagagcacatagagcgggggattaacagcccttcaatgtgatgtagtcataaaatgtttaaaaaatacatttagattttaggtagtgatggttgaattctaatgatgtgccttgggcctgggggtagatgtatataggcagtgtagtggccagaatttaatgtaatattttatgatgtaatatgctatactgagcccgcatttgtggtgttggaatggggggagatttttccggtgagccatgtataaaataagcttatgatttctctgatggtagtcactcaaaggattttcaaaagttgttttatgactttgtaattgaataagggtgcccaggattcacaatgttttttattaatgagttaggagaaatcttccattgtgcgaaaacacagattttaatcacaggtacagattgttatagaatcaaagacaaagaatgtaatggtgtatcagtcctggaatgtataacctcaaacagattgcaatatttctctgcctttggctgttaatgtactgctttctccagcattgaatatgccagatacttgtttttcacttctcatccaataatttatttcatatcctttttaattcactcgtcttttcactcttaatgcaactctcacactgtagcataaacttaaagctgccataaattactttcaattttgcatatatatttttcataattttaatagcttgtgaatagactctaagtcagatacttataacattagagttcagcagaggtgagctaatttttctcttgtgatatatggatagatctccagtacagataatggttatatttctatcttttatctctatctgtagcaacagatactccctccagatatttttcactgtatacctcaaaaacttattatatttttggattattaggcctcctactgtaaaggagtataaaatagagaaatcttattgtactgagaaagaggcagatcttaaatgtcagaagggaagatgtcattactctttcccatccttaggtaccaaaagcggatgcttattaatagataaaaagtagagtgttcctaatacatattaagaattaggcaaataaaaatgaaaattgttttcccacttacacagtaattccacttcagagaatctaaggaaaacagataagggagaaaaattgaagcacaggataagttaattacagaatttttatgatagcacagaatgaaaatgtcctaaatgtttcattaaaagtattaataaatggttcagtaatgacaagtaaattttggaacacatattcaatttgctatagaggtatatattaattactcatttaaaatgacaagaaaagttatgtaattttatggaaattgctaaagatgggataattactattatagaaaacatccacaagaccttagacaagcaaaacaaaaatatgttgataaagactcaaatctaaaacctcaatctatgaaactactacaagaaaacattggggaaaatctccagggcattggtctgggcaaagatttcttgagcaataccccacaaacacagacaaccaaagcaaaaatggacaaacaggattacatcaagtttaaaagcttttgcacagcaaagaaaacaatcaacaaactgaagagacaacctacagagtgggataaaatatttgcaagttgcccatctagcaaaggactaatgaccagaacatataaggagctcaaacaactctataggaaaaaatctaaaaattcaatcaaaaagtggacaaaaaatttgaacagacatttctcaaaagaagacatacaaatggcaaacaggcgtatgaaaaggtgctcaacatcattgataatcagagaaatgcaaatcagtactacaatgagacattatctcaccccgttaatatggctaatatccaaaaggcaacaacaaatgctaatatccaaaaggcaataacaaacgctattatccaaaaggtaataacaaacgcttatatccaaaaggcaataacaaacgctaatatccaaaaggcaataacaaacgctaatatccaaaaggtaataacaaacgcttatacccaaaaggcaataacaaacgctaatatccaaaaggcaataacaaacgctaatatccaaaaggtaataacaaaagcttatatccaaaaggcaattacaaacgctaatatccaaaaggcagtaacaaacgcttatatccaaaaggcaataacaaatgctaatatccaaaaggcaataacaaacgcttatatccaaaaggcagtaacaaacgcttatatccaaaaggcaataacaaatgctaatatccaaaaggtaataacaaacgcttatatccaaaaggcaataacaaacgctaatatccaaaaggcaacaacaaacgcttatatccaaaaggcaataacaaacgctaatatccaaaaggtaataacaaacgcttatatccaaaaggcagtaacaaacgctaatatccaaaaggcaataacaaacgcttatatccaaaaggcaataacaaacgcttatatccaaaaggcagtaacaaatgcctgtatccaaaaggtaataacaaatgcttatattcaaaaggcaataacaaacgcttatatccaaaaggcaataacaaacgcttgtatccaaaaggcaataacaaatgcttatatccaaaagacaataacaaacgcttatatccaaaaggcaataacaaatgcctgtatccaaaaggtaataacaaacgcttatatccaaaaggtaataacaaatacttgtgaggatgtggaggaaagaaaacctttgtacactgttggtgagaatgtaaattagtacaaccactattgagaagagtttggaggttcctcaacaaatctaaaaattgagctaccatataattcagcaatcccactgctgggtatatatccaaaagaaaggaaatcagtatatcgaagagacactgtactcctacatttgttgcagcactgtttacaatagctaagatttggaggcaacctaagtgtccatcaaccgatacatggataaaaaaaatgtggtacatatacacagtggagtactatttagccataaaaaagaatgagatccagtcatttgcaacaataacatggatggaactggagatcattatgttaagtaaaaaaagccaggcatagaaagacaaacattgcatgttctcacttatttatgggatctaaaaaagcaattgaattcatggacatagagagtagaaggatggttaccaaagggtggcaaagctactgggggttggtatagttaatagctacagaaaagaagtacttagaaagaatgaataaggcctactatttgatagcataataggttgacgatagtcaattacgacttaattttacattttataataacttaaagactaaaattggattgttcttaactcaaagaataaatgcttgtgggatgtattattaccccaatgctattattaccattttccatgatgtgcttatttcacattccatacctgtatcaaacatctcatgtaccctataaacatatacatctactctgtacccacaaaaatttaaaaaatatgtattgaaaaaattttttaagcatttatagtggttgcatttggtgataatacaatggtggtttatttctcctatttgctgtgttttctcagtttttgattacacagatgcagcaccactacttaaaccatgtcttgggaaaggttaaacaacttaatgtaagttagtgacatcctgtaagcttaattcaatttatgtgacctaaaacagcattctgctatgagaaagaaatgtaattaattattttgagatatatgttgtagctattatacagtaataaaatgttagtgagagaagctaggtgtggtgggatacacttatttattgtaaaattccttcaactttattgaaagcttgaaatattttatgatacaatgttagggaggaacaacaaaaatatgctctgagtttctgacaaccaccttacagttaagctttcagagcatcatttctacgcaagtcggaggcagtcagtataaggtccattattcattcgtaattctgtttttcctggtataatctaattagatgtgacatagtcaaatattgggggttatacaaattgatctgttaatatgtaatttttttcttgtgcttatggccatttttactctaagtttgattctatgggttaactataatattttattactcattctcctaaatattatctcttctattatctgcccttaaaatttcttaatatgttgatgtaatatttgaataatttatttatagggaaacaaaagtacatttttcataaataatattactatgtatatagtaatagaagtctatgtattcacatgtatgtaatatatattttttccttaccacagtgctgttttatatttttaaataacctaaagtttttttttcttttttttttctttattattattatactttaagttttagggtacatgtgcacaatgtgcaggttagttacatatgtatacatgtgccatgctggtgcgctgcacccactaactcatcatctagcatatgtaatatattatgtgttatatagttatacaattaaacattattaagaagatggtaaccagctgttctccttcttcagtgatgcaacagagctagaatgaatggggctgggaaaaatataaagcagaaagaatttcattatgcacatgtatttaatttgggaacaatacatgtttcagtgaaatgattgtgtgtatgtatatgtataatataggaatatagaaataattgccttgagaaggtctatttgaaaatgcatatgtactaagttaacctaaaatataaaaattttctttttatgagctcatgaactgtaaaaggctacaggcaatatatatttattatcctgctatcaggatattaataagataaaatatagatcacttcaggtgtgtgtttcctttgtaaatttttaaattttagcattttttaaagcacatggattaaaaaggtgaattaagctaatttcatcaaggagacagaagatctatgcaaagcctcctagagtagtctttctgaactgacatttttctttggtcaatatttgctgctaacttttagatcaatcctttgaaattatacatttgttgggatttttctttggtcaacatagtgacaggaaatgaaccaatgatataaatttatgtttaactttcctaaattcaactttatctagagacttccttttggttccttgcttataaacatatccccttgaagttatttacagtttaactatcattatgataaaaatccttctacttatcaaaaaatattttatatatacagagctaatgaaatatatcgcctctgtgtgtacaaaatatgaaagttaatatgtaatgcaaaatatatttctgttaacattaaatcagattacaagtaatagaaaaatccaaatagtggtgatttaaacaagacagaattgtatttcttcctcaaatttatgaagcagagagataatttcaggctcgttttggtgttcaaaagacactgaaattcctttcatcttgttctgttatatatggtttccactgtaaaggttaactcttaatccaagataactgctgaagttccagccattgcatctgcatttcagccatcaggatggaagaaggcagaagggcatgccccttttattttaaggcacacttcctgaaatttttacagaacacctcagtttatattttattagccagaagttagtcacatagtcacacgtagctatacaatagactgtcaaatgtagtctttatttcatctggctatgcaccaacctgaaaatcatggttacctcactgtggtagacaaaacagtagcctcccaaagatgtccatgtcttaataattttacagagcaagagagactttgctaatgtgattatattaagaatcttgagacaagaagattatcctggattgcacagaaggcccagtataatcaccagggtctttaaaagagtgaagttcagaggagatgggatgatggaagcagagattggagtgaagtgtgtgaagatggagaaggacgtaaaaacctaaagaatgcaggtgacctctagaagctggaaaagaaaaggaaacagattcttcctgaaagtctttggaaggaaccagtcctacaaacactttaattttagttctttaagatgcatttagattttcaactaccagaactgcaagagaataaatgtgtattacttttagccaccaaatttgtactaaatttctataggaacagaagaaaataaatatacttatgaaggaaaaggggtttatggttattaggccccttaatagtctaccatacattttcttttcttttcttttcttttcttttttttttcttatttttttttttgagacggagtctcactctgtcaccctggctggagtgcagtggtgtgatctcagctcactgcaacctctgcctcccaggttcaagcgattctcctgcctcagcctcctgagtagctgggattacaagtgcccaccaccacgccaggctaatttttgtatttttagtagagacggggtttcaccacgttggtcaggctggtcttgaactcctgactttgtgatccacccgcctcagcctccaaaagtgctgggattacaggcatgagccactgtgcccggcctactctaccatacattttcagtggcatatccataattttggtccttgaatctatctatagttttttcatatttggattcagcagtcaagtgtcattggcaagtgggtaagaactctaaacaggctgcctaagtacatagggctcagtttaagcacttggtaattgagaacatctattacacagccaccagtactgtgggagaaggcctccctcaagtgctttgtctagtatttgcatgcatattccctcaatcctagcatacaacaatcaagtagtaaggcctggaattgaggccagagagaaagagagaacaaaaaacctgggtgtgttgaggaggaggtcccagagagtggcctgtctctatttgatgtcctggtcctttctcttagtgcctggtagtctgtctcctaggtctccccatctgtctgagttcaccctccattgccacttctcaggttgatgatttctgtctgattatctcaccactcatgctgatcactgctttctaaaggggattttggtgttgttcttgaccctagattattcttcaactcaagttttatacattggctgagtattaattttcttttgttaatttgagacttgccctctgtagtagatagaataacgttcccccaaagatgtccatgttctaatccccagaacctggaagtatgttgcattatgtggcaaaggagatttagaattgcatatacaattaaggatgctaatcagcatatgctgagattaccttggattttatctgagtgggcccattgtaatcacaaagccttaaaaatagaagagggaggtggaaggtttcagcatatgagggagatataactagagaagaacgatctgtgagatgcaacactcctgggtttgaatctggaggaagaggccaccagccagggcatgtgggtgccctctagaatgtggaaaagacaaggaaacaaattcttccttagagcctccagaagaaacacagcactgccaacactttgatattagctcacaaaaacccattttgaacttctcacttccaaaactgtgagatgataaatttggcttgttttaagccaataaatttgcaaacatttgttacagcagcaatgggaaactaatgatatatccgccaacctgtttaaaaaaaaaagacttgagagattagaggttaaagcactgaataagaggagacatttatgggagagaaaaaaaatccctctaacggaagcagaggcagcacaatttataacacttgtgcaacaaattttgcttcacattttctggcatcaaaggcaaaaagagaaagatctttggttacatagttttcattatctgatgacagcatataaatgcacctgaaaatgtagcatttttcttccaaatgtactagaactgagattcattgaagtgtccttgcttagaagacactggcaaaactgagggccattctttgaaccatggtttaggaaaagatagagtttccactggctcctaagggagcaaagactgtgttgtgattttgaggtcatctgagagaggctccagttatgtatgcagagattttgctttttgaaagtcttaatgtagagatatctcctgaaagaagtagctgaaagaaaagttaatttagctgattaaacaccaattttctgattgcaaggagagtaaagcagctgtgttctcctttggagaagaggtcttttagacagagacaggctttaatgaacttgaataagtcctgttttaggcaaatctcagtgaagaagaaaagtaagggttcaacaaagaggtaagttcagggctgccattcctcatcacagcaggcaaggtagcctggatcactgctgccaggagggggatgctgcccacaaccgcggcccctttcctatctgccaagggtaggaacccaagtcccagcaggtgaagcagaactgaattgaataattgtcatatataactgctttatatataatgctgcaagctttatccactccaggccagagttggatggtatgaaaaaagaaagtgtaattgcatagtggtggctttctattgagacacttggatggatgctaatatcagcaacctgttaccaagataaacagttaaaaaaaaaataagtcctggaagagttaacattgctctcaaaattcagagttgtaagataacctttagccaaactctaccttgttgattcagtcgagaatcacacgttttccataagattggtgggaggctgtcaatgcaagagccagatttgcatctgtttcccgaactatatctgccttagaagatttcacagcagggaccagtttatctcatatgtatttttaatgctaaaagaattttaaagttttctcagtttttttttaaatacttccccaccaccagggtatattgatcttcaaaattctgcatcatataaacagcaaaaaacgatttttttttttgagatggagtctcgctctgtcacccaggctggagtgcagcggcgtgatctcagctccctgcaacctccgcctcccaggttcaagcgattctcctgtctcagcctctcgagtagctgggactacacaaaaaatgattttattctaagtgctatttagattaggatattttcagggagactgaggaagatgacatgcatcgagtacatttttgggggctatacaccaaggaagatgttttaacatgttactttatttcatcattgtgacaacattctaaaataggtttgatgattgatctctgttttataaatgaataaatttcatctcaaagcagaaaagccaagattgaaacctgtgcttcctcccaagcctgtgcttttcttactaccttactttgctatttagtttattgaattttcacctcagaaatacacagttaattttttaagaaagaaatgaatgtaatgtggggaagttctttaatctctgtaactccatattgaaggaagacaccacaaatgtaaacactcattaaatattaactgaggaagtatctacatggtcttcaccatctggaagaatgtgggaaaaacaagtgaataagccaaatgttcctgaatatctgtacatttggcatcatgttgctaaatgatgcatatgcttggtgtcatttctttttaacattttatttagttatatttgttattaaaaatacagttaaaagaaaaggtccccatttcctttcccaacccatttaataaggagtagcaaatcttaacacattggttggtatcttcccagatattttaaattctgattataaatgtagtattcatgcatgtgcatgtgcacacttgtacacagaattatgcttattgttctgtgctctgctttttaagggaattttgtcaacatttttctgtatagataactatcttatttcctttgtgacattgttggattgctaagtgtcatttacacagagctcaagatggtataatcttgtaaatattgtgaagaaaacaatgtactcaaaatctcgttctatttcacagaaaacattaagataagtaaaaacagaaaagcattatacatgatttattaagttttatgtcaaaatgcacttatgaattgtagtgttgctaaagatggtacttcatttagtgtgtagttttggcaagttttttgactaatattaagattacataagttaggattgtgttttattacatgtaatatatggcgactttaaaatattggagattattttgctcattttgggaaaaactactcacggcccagctactgaacatctgttcaggaatatgaactaggggagtgggtaccataatttattcgtagctcagaaaggcctattccagttctcaggagaacgtcaaggcaggacacttgtgtggagtgaactgaggatggtgatcaggcaatagttcacaaaaaggaaagcaggctcttcatcaacccataaaaagacaaggttcaagctgacattaattcctcagtacaagaaaacaggacaatggcaagagggatctctgccatgatctttatctgttgagtcacactattgccatctggacatgttgcctctccatgtctagagtacaaatgttgttctggaatctccctttaccttggaaggaaatcaagatttctgtcacctctcttctattttgggttccatgacactggcatctcatatctccctcttttgcatttttttctttcattttggtgaagcttagcttccactacatttttttaaagtttatattagattgtaacatatatacagtagacaaaatcttaaatgtgcatcttgataaaaactcacacatgtacacacttgtgtaactgccacccagattcagatataaaatctgggtttcctgaacccaaaagattctcttgtgctcctttttagttaacattctttttcccaaccaaggaaacactattctgacctctatcactatacaggagttatacttgttcttaactgtcatataaatggaatcatatggtatatatagttttgtgattgactccttcggctcaacatttgtgttgtttaacatggaaatagttcacccatttttattatgtgtgcaattattttgcccattctatcattgatgcacttttgggctatttcccaaatattcttatgcatgtcttttggtagaaataccgttctgttttgcttgactgtataccttgaggtggaattattggatcactgggcgtatatatattcagatttatttgatcttggcaaagagtgggtgtaccaatttatagccaaattagcaaagtacaagaggcttgattgattcactttattgaaaacacttgatattgtcacgggcttcctgggttgttgctttgccagccagacacctctgcggctggtggcacctttgcccaaattttgcttgagcccactggactcattctgcccacttagcctggtaggctgtgcttggctttcgctattggccgagattccatgtctgccaagggcgagccaggcacagagaagtgagtgagtgagtacatgagtacatgagtgagtacatgagtgagtgagtgaatgcagggtccagccactacattcagctaggcatgtgagctgctgtggggtgggcagcaccaggcgctggcatgggctctggttccctgctgcagctggaccaggtgtactgcaagaggcttccactgcaggcaccagggaacatggtagcacctggaagcttggagacagcaggaaccacagagccccaaatagggtgatatagccctggctcagggacctcctaagtctgggatccctgaaaggcctcaactcttccctttcctctccttctcatcacctgtaacatggcaagtgaggggcatgtttcagccctgcttgtgttacagccttttcagtcctgccatttggtggatcctgagttcttgtcctacatcctggaagaatgaggtacacagacaactggagggtgaacaaggcaaagatgtgctttattcgagcaacagtacagctctcaggagatccaaagtgggtatctcctttccacaggcaggttggcctgatgagtgcagccctcaatggagaggagacccagaatgggtagctcctatctgcgctcaggttatcctgacatctctccagccctcagtggagaggagacctggagtgggtggctcctatccctaggcaggttgttccaacgtctctgcagccctcaacagagaggaaacctggactgggtagctcctatctgcaggcaggccatcccattgtttgcctgagtctggctgagtccagagtttttatgggcttcagaggggaggaagtgcatgttgattggttcatgggtggccatgggcacacctggagaaagcaccgtaagtttccactctggtctgtggaaccggcagcttagcccccaggcttcaggccatctctggcgtgaaggtggggttttaatggggatcttcctgtttctgcccaggaacctgtctgcctcctgctaccattcatgatgcccaggctgtttgtgccctcgccaagttgccctaagccccacctcggcctccttcccatgctcctcagtgcccaaagttcagaggaggcctagggggctgggtgctggcatgtcagtaccgccctaagcgtgtacacgcctggctgggtcatgacagtgcccaggtttggccacaactttgctctgaaatcagagtgggtgccaggagtggggagatgccaggcagtgggagcaggcacttccaagcctgcaggggcaggggggcttcctgggccccagaagcacaggatgcctaggtctgaagccgtggttatgtggctgcagccgtgcccaggtgggcgggctctcaccacaccaacttgggggagaaactcccacctgttcccagctcccaccagctctgctcgagcacgcggccccagccgtgcctttccccgctgcagccagcatctttgcagcagcagcttcatatgggccactgctgctatcagtaatgttaatcttctgaatttttgcaattttgttagctatgtagtcgtatctaattgtagcttaaatttttatatccttggtgaattgcttatttctatttcccatttttaactgggttgcctacattttttctttacttatttgtaggaattctttttttttttttttttttttgagacggagtcttgctctgttgcccaggctggagtgcagtggtgccatttcgcctcactgcaagctccgcctcccaggttcacgccattttcctgcctcagcctcccgagcagctgggactacaggtgcttgccaccacgcccggctaattttttgcattttttagtagagacggggtttcaccatgttagccagattggtctcgatttcctgaccttgtgatctgctcaccttggcctcccaaagtgctggcattacaggtgtgagctactgcgcccggtcaggaattctttatatattttgaatgtgacccctttatatatattgcatggactgaaccttcttgcaatatatttcttgctatataagttatctctttccataatattgtcaaaaaacagacaataaaaaaatccgggagtcacagagcaatagcacttatttaacttgagattctctaagtttcggatggtttcatgctctctcatgcatttgtggtcatctgtgggaaaacaagctgctctaccgttattagctggactcattgacacgtctgggttggctgcctattgactgatctagcatggctgtatctggtgaaactgaagcagtttgactctgctccacatgcttcatcttccagaaagcaagtttcagtattttcttataatcatggcagacaaacaagagctgaaacagaaatggtcagctctttcagcttcctttagctgtctgtcatatctgttaacatcccattggccaaagcaaatcagaaagctgatacgaaattaagggttggagtaaaatctctacctctgtagtaagaggaattgaaagtttcatgaaaaagcatgaaaaactggggacattaatgcaatcaatcttttgtacttgcctttttactctattaaatggtgacttttgatgaatataactttcttattttatacaatataatttattattcttttattaacaatatggctagtcactttttgctgtttcttaaatatatgtctaccccaagcttataaaaaaaactgtcctaggttttttaaatagaaactttctttttttttcttttttcccattttgggtctataagtcactataaattaattgttatacagggtgttaaaaaccatatatatctaattgtttaacacaatcactggaaaacttctcttctgaataaaaagaaaaaataatatttatagtatattatcagataattgtttatgagtagatctgctttagaatgctattctgttttatgctgttttttttgtctgcccttgcacaaatacaatacagtcttaattagtttaattgcatagtaattcttgatatctgatatagaagtcttgatattatcttggctattctaagccttttacttttatatataaattttggaatcaacataattttcaccaaaacgtggtgattttgattttgatttgatagaatttattgatcaattggacagaactgatgtgattctaatattaaaaatcagaatccataaacatgacatatatcttgatttatttaggttctttaaaatttctttcagtaatattttaaagttgtctgtctagtactttttgttgatttattgctaaagatttatttttatggtattgttaaaagggaattttaaaattttaaaattttaattggtttcggtatataaactacaattgatttttgtagtttgactttatattctgatacatttacttattaattctaatagttgatttgtatgttttggatttccattatgcatcatcgagtcatctccaaatattgacaattttacatgaaactttgatgtatttataccatttttcttgacttttcctacatgttaagaactgcacaatgctgagcataagtgacaatagtggagattattatcttgtttctgaagtaaggggaaaagcattcaatattttacttttaagaatctatccatctattacctatctatctatctatctatctatctatatatctatctattataagctaagaaaatatcttcattttactagtttggtaagagtttttatcttgaataaatgttaaagttgatcaaataaattttctgcatctattaggatggttgcatggttttgcttcttcattatttaatgcgatgaattatattgatgcttttaaaaaagtgaaaacatttcagtcctagaataaactctacttggtcaggatgttttatccttttatatatacatgacttcaaggcatgaattttttgattagaaattctgcttagatatttatgaaaatattgttctgtagttttcattttttgtgtgtaaaatttttgtcaggctttgttatcaatgttatgccagactcacaagacgtttgcaattgttccatcattctctggtttctgaatgatttggtatgggattagtattgtgactatcttaaatttttgaaaaattttaccagtaaagccatttggtcttggagttttctttctagggaggtgcttaattcaggttcaatatgtgattattcatgttttttgttttcttgtatgccaattttggtaagttgtgttttttaaggaattaatccatttcatgtaagttttctagttactggtgcaatgctatttctaatatcctctgtgcacctttttaatgcctttagtgtctgtagccatgttctcttttttcattaatgatgttggcattatcttgctcctttttcataatatatgtttgttaggaatttattattttaaattattttcaaaggaccactatttttctgtactgagtttctctattttatgactgctttttgtttcattgatttctgcagttaatatatattttttcttttactttcattgggattaacttgtttttatttttctagcttttttaaataaaagcttaaattttagtgttttaaaaaatatatatatttacctctatagtattttttaaatcactgttacagttacatgcatttcacaaatttggcaggttgtattttattactatgcagttaaaaacattttctaattttcattttgttttcttctttgacacatgggttaattataatatgttacataactttcaattatgtagacatttttgagttatttttatgtgttgttttcaaattatctttatagttctacttttgaattatctttataactgtttatctgtttaattctactttggtccgataaaatatatggtataattacaattctttgaaatttgctggtacttacgctatggtccaacatctttttcaattaagtatttgtaaagataatattctgcatgtaattataaaaggatgaaatatatatgctgaagttttttattgacatgttctctatatattgataaaagtcattttggttaattttgtacttaaaataatccttctaggagatgaccagttttttcctaaaatattataaaattatgatagtagattaatataaatgtaagctgttatatcttcctatttaattaacgtatttgttattacaaaatgccctatttgttttctataatttttttccttcaattctttgtctcgtatcattgtaatctgtttctttttttttaatgtagtgtttggggatttctttcttcatcttttttactttcaattggtctctatacttatatttaaagtttgtctcttataaacagcacacagttaatatgtttttatacttagtctaaaaatccttgagttcaatatttatgaacatatttaatgtagttactgaaaaactggctttaaatcaatactcttttgattgtcttttagttgttccacttattatttcttcttttgcctttctttggattaatcagtttttaaattttattcatcttgttaacagctttgcagtaataaattcctatgttattattttagagattatcctacatatcatgatatcatctctgactttctagtcttcctgactttagtactttcaccagtttcccaccaaagcaataattttatcacagtttatccatttaggtaatctaggaaaatctccctattttaatgtcaactgattagcaaccttaattccatcaggatccttaattatcctttgctacataatgtaatatatgcagtttctagggatcaggatgtggaaaattttggaggaccatctatctgtcacctaagaggaaataactcagaagaggctgttgaaaccaaaaagcaatgagataaattaattggcaaatttaatttcttctccttatccgtaattacacagtggggtagagcatataatgaaaattagatcacttttagaaaatgaagaagccatgtttcctttgcgcatctgtggtatacagtgaacaattttttttactgccctacatgcagattgtgagatacaatctgacaactttcttgttaatcattaatttaataactactgcttaatataattctggacttagtctatggcttgagcttgagtagagcatgtctttctttttcttttttctttctttctttctttctttttttttttttttttttgacagagttttactctgctgcccaggctggagtataatggtgtgatcttggctcactgcaacctctgtctactcgggtttaagagattctcgtgcctcagcctccctagtagctgggattacaggcgtgtaccgccatgcctggctaatttttgtatttttagtagagacagggtttcaccatgttggtcaggctggtctcgaactcctgacctcatgtgatccaccagccttagcctcccaaagtgctgggaatacaggtgtgagccaccgtgcctggctacagataatatttctttctaattcatctggatattaaaaataatttttatttgcatgaaaatcattactctgagacaatgagatagtcctagatacttggtggcaacttctcagatgaaaggttttcatttttctttctaaatttctctgctgtttcttgtatgtaggaaaagaaatcatagtaattatagaccatcagattcaagttaaaagttgctgaaacctgtggctgtttttttctaataaaatatttctcattagctggttaatctgcttgaagattttcttttcctttgggtatttagatgtcatgatttattatgttatctttatgaagtaattgtatctttagtaaataatcccattaaaagagtttgggaactttgcaagagaagaagccagttttaaaaattgaggtgccatgttttcccacagggatacactgttcaccttttggaggtcaatataaacaagatcaaccataactgtgcactgagaagtgttttttggtatcagaatgtagactaattgaaccatcaatgacacctttaaaattcttatgcctttcacatcctataaagatgatcattattaaatagttcaagggttgtgtatttgaaatccaaagcataaacactgaatttttaatctataagtttgtgggcaaaaagcagtcagatatttagggccattctgatgatgagctgcatcttgttctgtcatctgaatgcttgtcattttgtagatgggggataaacagtggtctcttcatgttaatgaatattttccatacttattaaaactaagttttttttaataagaataagtcaatgagcagacagacaagttgctttttattatttttgtgtctcttttcaagttcactcttcttatagaatgcattgtattattcataaagttaatgcgattggctgctatttcacattcttacagccaatttgtgcagacttcactcttttggtgagatcatcatgattgtatgtctcaggttgagcttttgatctttgtaaagaagtttgctttccttcatcctgggaacatagatgacgtttatattctccatacagttatgttataaatgcatgtctttgatcttatgggaggaggtcataaattccttatctatagtaaaactcaaccaattaaaaatatcctgacagcagccgatcagaatcgtattttaattaaggatagcagcatgatagggtggaaatacactaactagttactaattttctttggatgtcctatataaaaggatggtttaaatttctaaggtctactttttgattaacttacctagtaaagtggttccaaataaaattttattgcaaaattatttcaaatttgagtagtatattaaaatttcatcattgcaatttgtgtttgggatctgagagggctagtaaaaactggatagtagaataccataagaaatgcaatatttttttcgagtatgtctagcaactcaatggcagagtgtttctaagtaggaagcctagcttgtctggtttaatgaattgtagtatttaagaaaggcctcccatatttttagtgtttgtttacaaatactattttgtgaaatgagtcagatatgaatcatccactaatcttgtttatgaaattaatatattcagtaaaattctttgaataacagtagtttccaaacacattctatgtgttagtgggatctaaatctatgtgatattatgacagtttgaactctgttttgatttttacttagcaaaatggtgaactcacagttaagtatgacctctttgattttcctaagctttttttgttgttgttcagtgtcagttcaaagaattgggatgagtgggtagaaaagtcacacattcttatgaaataaaaaggacagccacagttttatacatatgtgtatttacatatatgacatatatgtatatgtgtatgtacatatgtatatatatatgtgtgtgtgaaagtgagggggagagaggaatgaggtctacataatttaattttattactagtacatttttatggttaattcaaatatttaggcaaatttgcctttaataggaaaatcatcaaaaaggcaaggcaagtagttgcataagctttgcttttttctgaaattacctgcattcacttagagaaaaaaggattttacattatctatcaagcaactaatttacatatatgatttcaggtatttcaatttcaatgtgtgtagcagttcaggaataaaaatgcagtattttcttatattatttgtgttttttatgattgagccgtacgatcttttggtttagttaggaatttggcttccccatccctcctattaaaacttgatttttggaaagtatagatagaagagctgtgcttttcttttaaaatgcttataaaattcaaaagcaactggaatacattttatgataccaattttacatatatttaaaaaccaggactacaaaatataaatttataaaaaattataaaaaatgattgggattctttctctttggaatgattatatgttataaacatacagcaccgtgagtataaataggttactgtttctcctaatgtgcctactttaatgatgaattgcattcctgattacagaatcatgagctatcaaaatacaccaataaatacaggcaaacattggtaaaattccgacttagaaaataatcaaagcttaaagcttagcattctgatttggagcaagaaatatgtaaattgtgaaataatgagcagcttctgagcacatcccctttattttacctgcaaggacctgagtcagaagtctgcatttcaaaatgcttctttttttttacagtgtggatgaatggccacgaataatacaaattggctttactttccaagtttattatacttaaacatttgttggcaggttagcgacatcatttattatataatgaggtaaaccccaaatggaacccccaaacatcttctcttcctggtcatcataggctgccattcttcccctagaaattaatacatctgtatgcgggatcgtgccttctcatcccctgctgcagaatcctcggtcataacagcttttgtgttcatgaatatgtaaatgtaacatgcataaaataaaataaaaaagcagacagtttctaccacagactgcctaactctgttgaactaatacacaaaaagcgaagatttaatttttcaagcattttgagtcagtgtttcaaggcatgacataattatgtaatataaaaatacataaattaggcatatgcagatgtgcatgacagttagactcaaaataaatcggcatgtagtcatggctatagtgattcatgcagattcacttactccttcactctgatgcctagtaatacggggtaaatgccttaggtatttaatgaccttgtatttactgactagattctactcctatacttcaccccaataaatgactaggaaaatgtttaattaatatgtattatttgtatatgtatgtatatatatgtattatacacacacatatgcttttttcttttgaaggggaaaagcgatggctatcttccactgaagtattctggaggaagctgtgggaagaaaattggtggattttattattgaaataagcaggcatgttcatgcatatttttacggcatgcatggctatgcgccactctgtgcaaacagtgctattgcagcttgtgcgcggtaattaggttgatgtaattatggtgaaataaaggcagtcgcactgataatttcacagtgaatattaaagacatatgtgccttccagtgtacaatgaatgaacctgaactgctgtcagggtctaggaggacagtgtggccaatgcacctattgtgtccctgctgcagaaaggagcctgccgattggccactgtctgcagcacatagcactggctggttataaaggacttgtctaggggagagcctgtaggtactccattgtctggtaaagttcatatgactgcattctttttgcaaggggggtggagggagagcggggaaggagggggtgtcagctcaactgtaaaagctgcacagattttttttctttctctctctctgcctctccatagattgtttctgtttcatgccctgtctcatttcgcatagctaaaaaagaatgctaattaagatcccttgtcttaacctgaaaaataatgactcggctgtaattagaaatctggtgagagtttaaaaattctggtaggggaccaaaaacatcagttacggtgcttaggaagaaaatgaagaattatttttctgaaatcaaggtaaacatgggagaggggggttccccccatctttttaaccaattttaaccaatggtgttctactgcagatgagaagatactgtatttcaaaaactattttaaccatcaaattgaaggaacacaaatcagtagcaatagaagccttcttaatcctccttaggatgcaattcagatgaaagaactgctttttctatttttctttttgtgtgtgtgtgttatagatggatctgagaacgctgtctgggcttggtaccaagagctggtatttcacagcagcgaccgcctcacagacgagctgtgggaagcaggagggagactctctcttagggtgccactactatggagacacagctgggctgaacaagatttgcttcaaacgacaacaagagagacagaaagtatctggttcaaccgctgcccgagcaggcaggcaccagaagagctagcagccaatccggccatgctcgaagccagctctgcagctcagccaatcagtgacatcattggtgagaaactcatttacatcatgcagtaatgaactttgtttaacatagacttccccctttcctgtcacccccccccctttccatattaggtccttccattaattattctgctggcataatttaaaccgctatgcaaaaatgtggctacattctctctgatggcttttacctcccccccccccccccccattggtgtctgccgtcactgaaagtgattctgggtacaattctattttgttttgaacttgcaaaaattatcttctctttcttaaaaaaaattcttaacaacattaaacctctgtttatattgtctgatccctcttcttatgaatgaatacatgcttctccaagttggggttcagaattgtacaaggcaacagagaataaggtgtgcattgccatggaagttgcaggtttttcaaacaatctgtatcttagaacttcctttaacgtttccagattttatgctgcagtggccattttacatacagtgctttatccaaaaagcacttgtatgcatctgtcacatggaggaaagttcactcttgttatatttcattctccactgctctcagccaacattgtcattttattaatgaatagaactgaggtcatttctggacaaatctcccccttcccatcccagcacaatgcacctgatttgcatccatttactagaaaaaatgaatacaagaaccagcttgaaaagaagttaagggaccagcttacgtattatttcagaatatattgcagtaatacagtttgtttttttaaaatgtgtaatatttaacatttgccttagtgtttctataaaaatgcctgctatccatttgcaatgtaatacctttagcaaatttataggattgttacataaccaaagtagatcaaattaaataacgttcacaaatgagttcatttatctgcagaaaacctgtggaaatacaattttgccttgcacatttgtatttagttgtcagggataaagtcattttttctatagataacttaaagaggctggaacatgtggcatgtgaagatttcaggttgctttataaaatcccagagagcaaaactgggtcacacttcaatgcaatttctattaagtcatatctttattgcatatttgcgttaaaggcgcacagttttctagcagagaaggtgaagtttcattgtctttcttttaaaaggatgttttgaatataattattcaaaaacatggaattttaaaaatattgacaagggtttcataatagtgcatgattcatttaagaagcttagagaatgcaatgataggcatagtcactttttaaagcatatgaaggatttagatgggaaaccatggcccttttaattcatgaggtattccatcatcccatcatcagtattcagggggcgactgtcctgaatcagtcacgagctcccctgctgcagatcctgtaatttgaatcatgtgtaataatatattatcctactgggggccttctttcagtaggagaatggtttatacattctgctgtaagagaacttttggcttctagccgactcacagctattactcacataggcaatcacgatcgtcttccttaaggaataacatctgcacaacctccagagccaaaaatctgcaacctcccgcacagtatgaattatgatttcttggaattgggaacacttgacaaactgaagtagaaaaatggaaggtttaaaggaatggatcaacattttattgagtgtgccatgtggcgacagcgcaaactcccattcctttgaaatgatggagaatggtgaggaaagggggccaaaaatatacctacatgtgttcatttgatttttagacacagccgaaatgtaatgtgttttatgaagacgtggctgcctctgtgtttttctgtggacatcctagcaaggtcctgtaaagggcgtagcaacgtggagaaataaatggggggcgaaggtggtcgtgaaagcagagaaattgtctcccctcgagaaggaagcaatgtaatgtagcaggaaccattttgaccccggagttaaaaattatagtgtacctccgactctttctcttgttatcaccttgatcagatcacttaatttctttccattttctcctgcattcaaaaattcaagacaatgccagcatagagattttctctttgtgtgaaatgccttcccattttttaagagtctagatccttttttgcttcaaggaccaagttaaatgtctcctcttctgtgaaatctctccaaatcatcacgaccagaatctctcacttctccaccccttttcatctcctttattgcctgtgtgccagtcagtattgctgtagggccacatgtgtgtacgtctttgccactagactgaaagccccttggggacagagaccacattgaattcttccacccccagctctaagaataatgaatgatgctcctaaggttcaaatccatgttttaattaatgaattataagtacattataaattgcagagggagggtcatacaaattctggggattacaattattgttgtcaactattaccactatgtaccagttgatgtcagctttacctcatcaatgttaagccttttatttcactggcccttcataataaatctcagattaaatggtccttgtattatttttcttaaatagccagtcataaggaaatgcaaatcattttgtttattaaatataaaattgagccaacttagttggtgtttaaaaacttaaaaataggtgaaatttatgtagattcaagcaaccatgataagcaaattacagtatccagctctactgttcatgatatgaaaaattacttggaaaaggtaagcagttaacatggaatgttgaaatgctttacaaagcataataaatcaggaaatatagaatcccatgtcagcgttataattaatgtatgtatttttaatctgtaaactagtacaataatcttgagtgatttctagatgtttttgatataatctgataacataatgccaaagcatgattgattttatgttagttatctatttaagtttatacttttggttattatactactgctaagaggaaattaatgttttggcaaaaatgatatttttgttaatgtttgaaaatcgtctttagatttaaaaatatattttaaactgtttttcactaccttttatgagaagagaatgaaataattagaaaatatatatatctttacttttatatctggaaaaatagaaatttcagagcttgaaatcagcttaagtctttattttgtaaaagtattagagaggaaaagtatctcgcccaaaatacgtactttcaagttcccgggacagctaagactggtgtcaagaattcggaaagactgggtcaatatttttttaccctaccaaataatcttcatgttaaaaaccagcaagataggattatacaattttatagtactaacataaattacatttacttatgtaatccaatactgtatgtagaattcacatatcatagggaaaaatgggagactggaccttattgagctgtatttttccactatcctacaataatgcaattgggtcctaataaataatcatttatattagtattctttaaaaataattatggttatgatgaagtaaaaatggaaatgatatctgggttcactttgctagctctgaattcagttaacacagatattatatcttaatgacaagattggttaaatagatttgggtgggtcagtttgaactttttttaaccaatgaattatactgttattcttaatcttttttattctgcttaagtctccagttatcccaaagatgagatatttgcatctagccaattatttaaaaatataattctggaccttgtaaatactgagagatgaattgtgcccacttagaaacgaatgtttctcaaagacaataaaaatagtaggactgtccagcatcttctgtttagaaaattacagttaagagttcagagagtgactgagaaaatgtaaagcatcttaaagaaaatgttactttacttcctaatttaagacgtggtaactgacagccgtgtgcatttgaatactattttgtttttctaaatttattaaagtaatgataaacaagatagaaataatgtaacacccccccatactggtacttattgataccataattgtacggtccttattccaaaattaattattgaattaggaaagtggagtaaatattagggcataggcttacacagcaaaactagtaagtttgtgattgagaattgcttatttgtaagatggcaaagaaatagataaaactgacctaaaacatttgcatattctggctttttttcctgcttaacccttacgacatgatttaaaagcagtatcaatatatttcggtgtttaccgagtatttccacgaactgaagataacacatcttgttattgatcagtgaggttgctctgtaactggttgctgaaccaagaggaggaacaaaaggctttgagttaatggctaatatttgctggggcctaatatttccactatatgccatatgctacactatgtgctatgcacacattctttcatttaattctcaaatcaatcctttggtataattactatccttattttacaaaactgagaaaattgagtttcaaaaaggctaagccactcctcaaagtcacatgactaacaagcagcaaaagagggatttgaacgaaggattctgacttgagagaatgcattcctaatcattccaaactgaataatcagtacatgtgattttgctgtttgctgtagaaacagattttttatatatattacattcattaatggtgtatctggttcagttttttaaatgttcacatatatttttaccttagcattttataggtcagtttgaaagctattgagttcgcaataatatctacattaatattttcttcatattttggtatttctgcacccaatcagatcatttaggtaatacataccaaaacaatttctaaacagtgacataccagacaaatgtaaggtcatgttagtagtaaaatgtctttgtaagtctgaattactaaaaataagtattagactaaatgtttccatttcctctttttcctagatattttacttattaaatataacacctattttatgacaaaattaattctcattaatttggcagttgcagaatgtcactttggcttatttagaccctgactatccagacatgtaaggtagttcaggttctcactcctgtttacacatcttgtgtctacaacccactgcaatccacaggatgttaaaagaatcttacaattactgaatatgtagtaatatattttatgcctaatgctagattttttagtttttatctacagtggtcaagactagagggcatagctgacaagttgttgactttcagggaatcagcttaatttggggaagggaaaggagaaaacagaattgtgtagtttcttagcttcctgatgaaatgttgtccagtttctttctcaattttctatttctttctagaacaatgttgtacacttaccatatgtcagaaactgtgcaggcaataaaatgatcctctcatgaactccaacttcaacattgttattgattttcataatgaaaacactatatcaatatatgttcatgtataattgaggtgtttagtttggttacataatttatggtaccctcttttaaaaaaatctagaaaagcagaagttttgacccctatgattctcatttgaatgaaactccactccactgtgctctccactgtgcctttgcctcttctatgatcctgatacctagaactcaatacactgctccttggaaggtttgaggaatgcagggtgaaggaggactatcatctctgtgtttgggggccactaggcccatggatgtggtgcaaagacctcaatagcaggtttaaggatcatattctgattttgcccatgccttacgctattctcggtacagttagaatttgatattattttttctcgcaagattccttgatgttcgcattactaataattacctttgtgggaaagaatcaaggtcaacatagcagttcctttcattgcttctgaacttactgagaaagcacttaaagtataggacttaagcactagtaaagtacttaaaacatttattttcagaatgttaatttttacacagtgaaaactagagataatagtgtcaatgactacttagtgatcacttaactccatgaggtactgtgagaagtggttaggagcataaaatctctgtacagatgcctggttctgattctgaacttcatgacttagtagatacataaccttggacaagttacataacttccccgggccccagttttctcatctgtgcaatagtacataccttaaaagactgtgaggattctagtgcatttttgcaaaggatggcattataaagatgtgcaaattcatgttctttactcttcgaagtatggaatgtagagagtatgtgtttgtatatatttaaataaatattaatgcagtgtagttaagtgctataccagagatgtatttatgcttcataaatacttttaaagtttaattttacttcacctctttaaccaagttttgtttttatttgaacaagttgtcaaccattgttataatcatcagttttatcccatcaaatattggtttcatttaaaaagttgtttaaaaagactctatgttattttaataatatctatataagtttacaatttcaggcaactaataatattcaatccattgattctactttttcctccattgctcagtgtatatatcagaaaatacaaatgtccgaagtcacatgtaaaaatacatgaaaccatttattctgatttttgcaaagctcgatggtagagctaatattttagaccatgataccctagaatgaccagaggttaggttcctagttagtggcattctgtaaagacaattaatccatagtccaagtgtctaatgttcaagaatcagatacttgatcacgtagactgtcctttaacaatctccattgtactcaggaagaaaataatagattctaatccgaagacctgacctaaaaccctttgtaagtgctccaagcctcacttttcttattatgaaatggggatagtaatgcctaactggaaagataattgtgtgggctaaataagaggacctgtggagtactgttaggttttctcttctgtaagttttgcaaagtctgttcaagtgtgtgtttcaatgtcaatgagagcaacaggacttcaaataaaatgcaagcttctgaggaggcaaactctagtatgatgtattctatagaatagagaatgacaagattctttaaaaatatttctcattaaaacccccattagttcaaatgatttcaggggattgtgaatgcaagttaattaaatcagaattctttctcatcttatcctgggaatgactgaaactaaaaatggtttcattttaaaaagaggttcatgagctcgctccctctctccacctccatctctatctctgtctttccctgcctctgagagaaactgacgtatttgggtagagaagagcatcagtaagtgtttccagtgattgaggcagagggatgttcaaaggcatgagtatttttagattaatagtaacgatgcaactaattttcaggtgtctcattaaggtgaaaaataatatactataaatagcatcatatttggacacctatgtgccaattttatgatgcttttacaatttcatctaatctattacaatttgttattactcccttcaagttttatccatgctttcatggtactaataatgaagatgacgatcaactgaactttgccatgatattttgtaggtgtacctgttgtttgaactatgtatataaatcataaagcaaagaaattacacattctgtttgggatatcttatagtaatattgccttttaataatccccgtttctccttttatttaacagcaattacccaacatcctattaaacatcaacagagatcgtcttgcatgtcattatagtgcaataagatctgtttagcttttcagctcttacaagatattcattttgcagtggagttaagcttttctattaccttcctaggatgatggtttaggagtctttaaaaatttttattaaactcattttagttattttttccctttgttagttaattgatttttctaggactgagaaagtgggtttttaacatatctcttctctagggataggcttcagtatgggggctgttggagagaccatataccccatttctccggggatatgtctagtttatgcctattgtaccagggtaattattgatggtgccctctttcattttcagtagtgacccatttttcattagaaattatgtggccattctataatataaagttaatttctgaatgttttggtaaagattatatttttggatatgcaaatctgttgtcatcatgaaagtatttgtactttgcagattgtgtaacatgagtttaggttttgcaaatgtggtcactacagtaatagataattttgttgatatgtgttagacatgcaatgagtaattgttgatctaaactcactcatttgagcatcagatttcattagtactctagtctagactaacagcaggaagaagtccagcatgtcaattcatttaacaaatattggttgagcactatgtgccaatcattgctataagcactgagggacacagcagtaaagcaaatagacaaagtccgctgtgctcataaagcttgtgttctgaggtcctttatagggtaataatatatatttattaagttataccaatgacattttgctctcttatacaaattgctttgacaaaaggaaggtttcatttaaaatccagcctgtttttattcagactgctccatgatgtaggctaactttataccatgaattcctactgggtacgtttttctttctctcactcagtagcttacctgacatcttaggccctcctggagttgatggtgccagctgcccatgatttttatgttttatttagtcaagaagcagctcagaaatcctaataacttgagatcttcttatgttctagctaacacacaaaggtacatggaaaatgtactaccttatttgtttttggaaacttttcttttctccctgagaacaggttattgtcatttttgcctatatatataaaattcatgtttttaaatgtatcctcgagcttttcaagtgatttctctcctgtggaagcaccttctcttgttatttggctttttataaagcccacgaatattttaaaattttaaatgacttatgtgcataaaaaaataagcaatttatatattaagaatacatatttaagcaatttatctgttaagagtacatatttaaaatgagaacaattatatcataaaaccagaactgtttggagtttgacatagacttgagacaattgtttaattcctttattttttaaatgtgcccagaaaatgtgtaaagaaatggtattcaacttgctcagatttacagagtagtttgtgatagactcagaaaaaaaagattttttaaaatttgaatttttaaagttttgattataaaaatattttctctgctctaaatttgaaaaattttagagttatatgaaagaaaattgaaatatttagttattttactctgtataaattaccatagttgcacaaattctaaaaatacatatgtcttttgaataatattgaagtttcactatataaatatttatatcttgtttttaaacatgaagagagaaaatattatgtggtatgatataagggatgcacatttagatgaaaaataaaggaagaaagaattgataagacaggcatttaaaaacctaggtatttttgaattacaacttcacaaattatatgaggctatataggatatatatagaagtgaatatgaatatgtcaatgtcatttcataaaaatgttttgtggtacactgaagagagacatgtcaaagtgacaatgctgtcatagatgtggatgccctttcttgctcctgggaagtagtatctcttccctccacatatactctgggttataccctctcttaaatcctcatggaatttttccatcgatgatccttctcctgtatcatcaccttcctctcaaccagttcttccctcccagaactcaaaaatgaccaactttcactcatcctaagtaaacagatgaggaaaacaataatagccaccccccataaacctatttcctcttgtatctcttacttatccattctgttgctggacacgaagtcaggagagctgagaaaagactctaactcactcgggacaagtagtgtaacttctttgcactccagcagaattgatagttttatatttcataaaatataaaacggtgttaaaaagctatagtttttttttttccaaaagtactttgtccaccttgaacaccacataaatgtaaaggagaagagaggaaatatcctctacaagctactttttaattgttatttttagggagctctaaagtaactctaaaggtgtttttgacataatataattaccatttacagccatgatctcatttccatttatttattttgagattctgttcccactcagggttctaatggtgcaggggtggtagtagggtcaagttattttaaataacgatcaaggaaacaatctatttttaaaggaaataagctctttgtgctattgaacaaagatcgctgcacttgaagtctatttgttactccaaaattatttcaatgagagtaggaatcagatgatctcatatctattgctagctatgccactagtcatttgtgtgacattggaaaactggtgtttattggtttatcaggatggacaggagaccagatcaggactttcaacaacttttcttaaagtagaattctttcttaaataaaatcgactcggaatctcaaaatatttttagaaagtgcaatgaccctgtttggattagggttgggaacctcagagctgtattcttttactcctcatgcactttaggtggtgcctaagatgccctcattacagcctcgtaactccatgagaataaagccactagagtagataattgttgacattgcttagagtttgaaaattagactgttttttttttgttgttgttttgttttggttttgcttcttttggtcagccattaattaatataaattaaacttccactagatggcagtagatcaaatctttgatcttgacaatcttcagtctaatatttaaaagcacatatttggacttcttacacaaattttagaagaattttattgtcttatattttaaactttaaaattctttttcaacctctgaattttcacttggtattctgttttcaagacattacgaactattggttagtccagtctttatgatgtctggtaaaaaatattacttgctctgattatagaaatttttaaaaattgcataatgttcaagtgaacacattttcatgagcatctaaatttattattcatacagtcttgattttacagcttcactggaaggctaatttttaacccaaaatttacagtgacctggtcattcattttgctatcccataacgcccactcccttccacagcaatgcaattccaatgatagtctgcattgtgtatactcttaactttgcagagaggggatgctttcaaattatattagatgatgggaatttgtgataaggataactagcgaaatgaggtatctcaggaagctgcttcatatccctaaggttaaaggtatagtaatttcttggaggtacagagcaacaccttcctttgggattcagcaggtcctcctggaacccaacagctctggtaccctcatgccaacaatgagcctcccagaagttgcctctgctcctctttttggataccacttatttatactccccaggaaagaagaactggttgagtcagtttgttgtagttgtacacagatcatcccttaagtgcagtctcttgctaagtaagtcccctgagttggttagacccgactgaggacagcttattctttaactagtgtattagtctgtctcatgctgctaaaaagacatccctgagactgggtaatttatcaaggaaagaggtttaatagactcatagttccacatggctggggaggcctcacaatcgtggcagaagatgaaggaagcgcaaagggacgtcctacatggtggcaggcaagggagcatgtgcaagggaactcctctctataaaaccatcagatcccgtgagacttattcgctatcatgagaatggcacaggaaagactcgcccccatgatacaattacctcccatcgggtccctcccacaacactcgggaattatggaagccacaattcaaggtgagatttggatggggacgcagacaaaccatatcaaatagccaacataaaaggtcaaagtttatgcctgttttccaggtgaaactagtgatagctctagctccccattttactctcaaagtgatcccaattcaaaagctcaatgatatgatcacctgaacacacagttatctttaccttgagaactaagtctgatcttcaagccagagtcgtagacacaagacttgtctaatgaaaataattgtctgtggcaactttcttaggaaggagctgtgggacacaggtatttagagttgtatgaactgccaattatgtagtccttagaagaaaagaaaagagaaattaaagatgaaagctaactttaaactcaaattcctacctcactggttcaattttatccactagataccatctttttctaatgcattgtggaaaagagtattattttcattgttaaggatagtataaaactagaaaagaaattaagtggcttgcctgtatcacattgtaaatatcagagagaattccaaaattagaactttagagatggttagtcacaatctattaggcataagtagtagactgagtcttttaattatcactctgtataataattcacatgccaccaaatgtattggaaatagttatctttccatcaaaactattacccccaattttttaagtaatcatatttttagattttaaatacattttctcccacattagtcctctatcactttaatgagtatagttaatatggtgaatcgtagattctaaagccctttctctttttttttgccctcagaacagatttataatgaaaaaaaaacttaagtgactgaaatgttcaacctgaggaagagaagccagactcactggtcccattcctcagaatgtagtttctttcagagagggctgtgatgaaattttggcctatctcaatgtacaacaccagaaagagagatgatattataatttgagacattttgtttagaacgatttcatgcattcttctaatcagaatgggctattgaaaacatttgtgctaagcctgtcctctggaaatcatttatttcatttgtggtatttcaaacatcatcgtgctgagttggagggcagtggccattatagtcatacaaataatactgtatcactttgtttaaagtatagaaagacccgcttgttggttgaaaacctcctatgtctttctgaaagattagcttctgttcaccaaattccatgttattttccttctcctgaatacaaagaaagagtagatttcttagccgctaaacggttaggtggcagcatgtgactaattctggctcatgaaatttgatcagaaggcatcagagtcacttcaccgactctggcctgtgtcctgagatggccaagctccagcatggaaacagcctggatttctaagactctgcttggaaaggagccgcaccaaagtgaaggatgaagtgaaatacactgagtactaagtgaagatgaaagatttttatgacataagttactgaaatttcaagattcatttgttaccattgtatagcctggattttcctgactaccataggaaatatatgaagtttagctttataatttaattttatttttctgacttagcttagtctttgccgtagctgagattctttcaagcaagtagtgagtgagatggatcattacttaagtgttcattacttaaatgttcattccaatattacaccgaattggatgatatcttgtatcatatgtttatgtggccagactgatcagtgacagtttggaagacatgtatctggtgcagctaaattttgtgagccagaattagtcacatttcatgagccagaattagtcacatggtgccacctaactgtttaggggctaagaaatctactctttccttgtacgccggagaaagaaaataacgtgagatttggtgaacagtacaaaagacatgaattgagattatcatccaaatcatttttaacctgcctaaaatatgagaaatcatttagaacatatagaatctgtaggcaaatgtaagctgtaaatccgtatagtaagagaaggaaaaaggcagtaatattttgtagtttgtgattttaaaaaatcaacgtataatcttagagttctcagattttatttgtaaagtaatagtgttgtggaactagcaaataatcattaagtttctgtgatacattaactctttcagcataagaacatgtgaatatttgccttgtagatacggcgatgagaggttctggtttatttgggggcagtctcagtttatatcttttgtttcattacaattcttaatagtgtcgcttttcattcaaatattacactgaattagatgatatcttgtatcatgtgtctatgaggctagactgatcagtgacagtttggaaaacacgtatctggtgcagctaaatttctttttttttcctcagttctgtggaacataatacggcatgaaaatatcattatatgaggatgttaccacatccccatgtaatgggatcagcccacaaaatatttttgaatccataacttagtgaaagcattgtgatgagtacatctaaaataaacatttctaggtttctgtggatggactcaggaacctaatcatcaggtatataaaacattaaatcaaatgaaaagtgcagtctagttttcaataactaacttgccaaagagctttaggacgtaactgtttgtcatttcagcataagcagtggtttttaaatgcagctttcagttgtattaattgtgtaggtattttattttttattatggagaattttgaaaaataccaaaattacataatagtatatcaaactaccttgcagctattaaccagtccaaatagacatcaaccaattgtgagttctgtcctatccatacccccatctaaatttccccctatattattttgaagtaaatccagacatcatatcatcttatttttacatattttagcatttgtccccaacaagatgtacactttggtaaacatagttttatgtggtttctgtataatagcatagattgaacaaatatttgtcaaaacaaatttgggttgaagtttaacatgtcagcatttacccacattaaatagtcattatctcttggactaacagtttcccaatatcaccttaatcagaacaaattacctttaaatattccaaaagtaaactctaaatttccctttagacaatttagaggggtatgtatacgctccaatccagagatcaaggagctctgaaatggattctgcagctgtctccctttgaaattctttgctctgacactccagataacagtacgacttagctttcctgggaagcaaataggctgctcttcaaagggtgaataccttagactgacaggttaacttcaagaatgtaattctaataaatggaatttatggggcaaatgttaaaaacactaaaaaataccttttattggcctgtttattgagactaggaaggaacatcatgttacaaacaaattctgttttctttgtgctaaaacattcctatgtcatcttttaataaacttaactggatttataggaaaggaaaagtattccctttgttttatacttcagaaaataattaaaacacatttctgatttgtatgaaaagagaaagccagacaaaatttttaaaatttatcaaatgtaaaattgaaaggaaaagaggaaatcttggtacaggttatatttgtagcaaaattagagaaatttggaaggttgcaacatattgtttatgtattgtaccagtttcctggaacttactatctatatacataatatgttttttatttgtatgtaaatgatgtaaaatgattaagatggtagagctaatacggtttcttgaagaaggaggacattagggttagagcttatattaattgaatcacaggtctttttttggctccttatatcagtggatatagatggcattaacttaatttaggcatttgatttagattacagtgcaggagtaagaagcatatttaagggaatagctctgttttcaccacttagcagccatataaccaaggttaaaccttgcttctctaattatgtaatgatagtaatttaacctataaagggactgcaaggattaaatagaactgtcttggtaaatatttttaaaatgagctctattttcatgtttatgcataataaaaatactcacattttaagtgtacaatttgtgtccttggcaaatacatatagtcatgtagccaacatcataatcatgatggaaaacatttccatcaccttggaaaattcccttgagtccctttgtggtcaatcggctccacctaccctcagcttctgcaactactgatttgcattctgtcattacaattttgcattttctggaatttcatgtaaatggaataacacagtatacagacttttgtgtctggctttttctacttagcataatgctttggagatttattcagatccttgagggtatcagtagctcatctgatttattgctgagcagtctcctgtattgactgcatatatgacaagtggatggacactgagattgtttccagttagggaatgttatgaataatgttctgtgaacattaaagtataaggcttttgtggataaagctctgatttatcatagctaattgtgtagaaatgggattactgggttgcgtgttaagttcctgcttaactttttaagtaacttacaaggtatttttttttttaattggctaaaccatttgcagttccctcaaccacataccacttgctccacaacctcaccaaccattggtattggtcattaaaaaaaattatcccttctaaaatgtgtatgtaatggtatctcattgtagctttaacttgaatttgtttggttttcaaatcaggtaatttggactgataaagtaagttgagaagtattttattttctatttttcagaagcatgtgtgcaaaattgatattatttttccttaaatgtttagtagaattcaccagtgtcatctaggctaatactttgtagactaatactttcagcctgtttccttgtgcttattgtccattcgagtatcttcttcaggatgctcatttttactgcatcttttttctttctgttgggttttaagaattctttaaatatatatgacgtaaatcttttgtcatatatatgtctgcagatgttgttcctagtctgtggcatgactttttattaccttaacagtgttttttgataaatgaaaacctttaatattaatgatgtccaatttaacaattgatatttcataatttgcactttttgtgtcctggccaaagattgtttgcctaagccaacatcaccaagaccttctcttatatttccttttacatgttgtataatctattatgtttaattctatgaacgatttcaggttaatttatgtatatgatttgaagtcagggtcgatgttcattttatttgtgcataaatactcattagagtattctttgttgaaacgactatgcgtcctttgttgcataacctaggcacgtttttcaaaaaataaattgatgagaggccaaggcaggaagatcatttgaggtcaggagctcaagaccagcctggccaacatggtgaaaccccgtctctactaaaaatacaaaaattagccaggcctggtggcacacgcctgtaatcccagctacttagaaggctgaggcacaagaatcacttgaagcaacccaggagggaaaggctgcagcgagccaagatggcacctctgcactccagcctgggtgacagagtgagactctgtcttaaaaaataaaaaatcaaatcaaaataaataaataaatggataatatctgtggactacctattctgttgtattgatcttatgtcaattgttaaaccacattgcttcgataattctagctttataatacatcttagaatcaagtggtgtaaattttccaacatcgttcttttaaaaaattaaggctattttggatctatgccttgccatttgattttataatcaccttgttaatttctgcataaatgcttgctgaacttttcattgggatttcataaagctatagatatatatggagaaaattaaaaccttttctagtgttgtatcttgtaattcgtgaacatgatatccctctcactttttaaaatttttttagctctccttaattccaccaagccatattttggagattttaatatacaggcctagcatgaagtttagtaagtatactatccctatatgcttcacgtttgttcattctattttaaaagacattttaatttaaatatttagttgagccttactagtatatagaaacataactgatttttgtgttttcatcttggattccatggctttactacgctcagttccagtaacactttttatgggtgtctttgcgttttcaacataaatgatcatctcatctgtaaataatgtcagtttcattttttcctttccaacatgtattacattttatttatttatcatacttttaatcatattatttttgccctattgcactaattgggactcccaatataattttgaaaaaacactggtaagaacaaatatcttcacattgcccctgatcttagaggaaatcattcagtctttcacaaaaatgatgttagccaattttgctggatgtttttatcaggttgaggaagttgctttccattcatagtttggaggtaaattttattatgactgaattgtgaatttatcaaatgctctattctttatctgttgagatgagcatatgctttttcttttttatgtaataatatgctggattatactgattactggatattaaatcaacctccatagggctgagataatgtactattgttttgtctttttttgcatttttggatattgtttactaaaattttgtttgggatttttgcaactatgtttaggtgacttataggtctgtttcatgtaaatatgtatacatgtatttattcatttattcaaatattgcctttgtttggttttcaaatcaggtaatttggactgataaagtaagttgagaagtattttattttctattttttggaagcatgcatgcaaaattgatattatttttccttaaatgtttagtagaattcaccagtgtcatctaggcatggagctttttttgtaagaagaatatcaattatgaattcaatttgtttagtagttttaaggctatctatctagttctctgtgacttgttgaggaatcttttgtcagtttatgtatttcaaggagttaggccactacatccaagatgttgataagcctatagtttgctcataatattaccttttaatcattttaatgtctgtaaaatctgtatttatgtccattttcttcattattgatgttgggtatttatgtgttttatttcctgattagtccaattaatgctttagcattttttccctctgttcaaggaaccagattttagtttcattgatgtactttatttttttctctttttcttgatttttttcactcaactttattgtcttccttctaattacgttgggtttaatttgtttttctatttttgtttcttacagagaaatcttagctcactggtttttagatctttattcatgctgtatagttcccttgaaacacttattcagctgcatcctacaaatttcatatagtatgttttcatttagcttacattttatctcatttattcttacttatggtttatttacagatgtgttatttaatttttggacctgatgatttcccaaatattattgatttttaaattaaatctcatttatttatttatttatttttttgagacggagtctccctctgtccccctggctggtgtgcagtggtgcgatctcggctcactgcaagctccgcctcctgggttcacgccattctcctgcctcagcctccggagtagctgggactacaggcgcccaccaccacgcctggctaattttttatatttttaatacagacggggtttcaccgtgttagccaggatggcctcgatcttctgacctcgtgatccgcccgcctcggcctcccaaagtgctgggattacaggcgtgagccatcgtaaattgattctttagtgaccacagaacttcatatgatttcaattttcttaaatttattgagactggtcaatcttttgttcaggcactttatacccttgctaattttctgccttctctttctatcaactactgaaagtgttcatatcttcaattataatattggatatgtgtagttctttttcaatctttatcagttttaaacctctggtattagtgtatccacatttaggttttttatgtatactgatgaattgatcccttcaaaattacgaatatcattctctgtaaaaaatatttaattgaccaagattgtaaataaagtgtacagcacaattatcatatatgtataccttatataatgattaccacaatgaaattagttaacacatctattaccatccaagccgtatattagatttgctggaattgttcatcttataaagtttgtatttttataacatttcttgttataaactctactttgtcttatataaatatgaacactctagcttctttttaaaagtgtttgctttgtgtgtttattttaatccttttgcttttaacctatatgtcttcatatttaaaataggtttcttctagataatgtcttaggtattggtttttgattcaatctgacaagcactgctttttcattgtttttaattgagatgttcagacaatttaaatgtatcattattttcagtatagttgtgtttacatttatggtattgcagtttttttctacttgtctcgtccattcttgttcctttttctcttttcccttctttatttttgattaattaagattttaaaatttattttatttttaccattagttttacttttgtgttttttattggatacgctaaggtttctaatatacatctttaccttgcaatagtacttttccaaataatattataccagttcatgtatacagtaagaatcttataacaatatacttctattttcaaactttccatcgtttctactatttttggtgaaaattttatttctctgtatactacaaacaccacaatatatttttaaagcacacaattaattttatagattaaaaagtgtttacatttactcactttatttccatttccagtgctcttcattcacttgtacagatacagatttttgtctgattttattttccttctgtctaaagaatgtcctttgacattttttgtagtgcagttctattgagggttaattccctcagtggttatttttatggaaaaaaaaaagtattaatttcacctcagttttgaaaaaattttcactgggtaagacttgtaggttggcagtttctttttcttatgcagtattttaaaggttgtgttagttttaagtactttctaaggagtttgccgtaattcttatctttgttcctcagtatgtaatgtgtctttttttcttctgactgcttttaagaggttaactttagtagtaattttcagcaatttaattttgtaatgtctcaatgtgcttttctttagtttcattctgcttgggacttgtcgggctgcttggatctgtagtttgataatttctcagcctttatttcttcaaaaatctgttttttattccttctaactcttctccttttggtactccaattatatgtaagatagactatgcaatattgtcttacaggtcacttattttctgttcattttggttcccagactttttcctctctgtgcttgctttattttgaataatttctgtataatgtcttcaatttcactgaccttctttttctgcaatgtataatcagctattaatcttatccctaatctcagctcactgcaacctccgcttccagattcaagtgactctttgcctcagcctcttgagtagtttggatgacaggtgcacaccaccatgtccagctaatttttgcagttttagtagagactgcttggctgtaccaaagccaggctatttccaactcctggcctcaaatgatccacccaccttggtctcccaaagtgatgagattacaggcatgtaatctcattccttggcctaaatatctttatttttatttatttatttatttatttgagacagagtttcactctgtcacccaggctggagtgcagtggcgcgatctcagctcactgcaacctccccctcttcggttcaagggattctcgtgcctcagcctcccaagtagctgggactgcaggtacgtgccaccatgtctggctaatttttgtaatttttagtagagacagggtttcgctatgttggccaggctggtctcaaactcctggccacacatgatctgcctgctttggcctcccacagtgctgagattacaggcatgagtcaccacaccaggcctacgtatctttaaataatggatatgtgactgcacgactgcagcatttgtatccagatagataatcaattcatctataaaccagctatcaagtaactgtctaaatatttaaaatacagttcttgtttagctcattcttagttttgatcacctttttttgttgggtggtggggagccctgctggtcactttgaaaatatactacggtcaaatcttctgatatcctgaaggtttctttcagctggactaagctcccaactccaggcaagcccaagtttgtggcctcccgcattagtgctctttctatctaccagagtcgacagtatttgttcggctcagtatctgagtgtagctcactccagttaactagagttgttgacttttgcagaaatagaagcagtgggatccaaccgatatttagctacaatgcgaaaatgagtgcagttggtacctgatgtccaagtacaatgcactgaagtgtcaagattttcacatactttctgataaattgattctccatattctgtcccatcattgacattaatgtgtagttgaaagtctccagtcctgtatagcccagcgagaagttattccttgtcagctttgatttgacactgtcaaaggtcatctggtacccagcaagccagcctcatcaccaaagacagccaaaccatggatttgaagtcctgaaaaataaaagtcaacatcacaaccaaagtgtatatattctccttgtaacaggacttgatcttatcacttttctctcctgtgtttggtgagaaggtagtatctaatgtcagtttcaaaccttgaaaaacctggtctttaactgtgatttctgttcccagagtgttctgttcccagagtgttctacttttctgtgaaagtcagatcataatcacaccatttatatttggtctccaacgtcccagtaattttaccagtgtctgtatgagatgaaccagatgttgagaattccatgccactgcgtgactttttttttttcacatccagtttcaccaaccctgaaccaaatcctttgtggaaagtatctctgacagctatgccaaggtcagcatacgatggaggaatacattggccacactgaggtctgtttgtaggtcaccatggtgaagacttgggaagagataatctggtggtctccagatggggggtgctcccactgctgtgctcacagctgaggccactgggtttgcctgctgttgggtcacagctgcctcgactggaggacaaagtggaggcacatttccacttgcagcctgaatgttttccaaatgtaaaaatatttttgagctgtattagtcagtgttctgcttagaaacagaatcagtaagatagatagcagtaagataggtaggtagatagatagatagatagatagatagatagatagatagatagatagaagacaaaatgagccagccgtggtggctcacacctgtaatcccagcactttgggaggccaagatggaagggtcatgaggtcaggagttagagaccagcctgaccaacatggtgaaacttcgtctctactaaaaatacaaaaattaggtgggtgtggtggcgggcacctgtaatcccagctactcaggaggctgaggcaggagaatcgcttgaacctgggaggtggaggttgcagtgagccgagatcatgccattgcattccagccggggtgacagagcgagactccgtctcaaaaaaaaaaaaaatgaaatgtattatggaaattgactcacacagttatggaggtcaagaagtcccacgatctttcatctgcaacctggacaactaggaaagtcattgttgtaattcagcttgagttggagggactgattgtgtaaatcttagtccaaggccaaatggctgagaaccaggggcctccttggtataagttccatgcccaaaggcctgagaatcagaagctccgatgccctagggcagcataacctggatgttccaccttaaggaaagagagctaaattcttcccttcctctgcttattttgttctatctgggcccacaaagtattggatggtgcacatccatattggtaggggcggatattctctacttagtctactgattcaaatgagaagctcttcaagaaacaccctcacagacacaccagaaataatattttaccagctatctgggtatcccttaacccagtcaagttgacttataaaattaaccatcacgttagccttatttctagtcgtaaattcttggtaaatatttgttgaatgaacaaatgtcatattcttttccaacaacaatagctatgtttctaataataattgttaccgagtgtttagtaagtaccaaactctagactacgtttttatgattgaacctcatttagttctcacaactaattgtgatggaaaaaatgataaggaaactgaggcttagaaacatgaagtaacttgcctgaagttagacaactgatcagaagattgacccagagagcttgtctccagaatccagtctgaatcacaatctactgtgcctttattttagccacttatgaacaaataaatttagtaaccctcttgctaaatatctggcacacatggtttggttgtataggattgaaaattttttttgtacagatatcacttttcattagaattgttgtagtgattagcatgcttatattttcccaaatgtgccatctctcatctcaaattctaaagtcaatgagttgtctttaggagaaagaactggtttatatcttttaggctcaattcttggagtgatcaatcctgctaatgctcatcttctttccagttagtaaggtctgggtccttgcacttttttggattctctttttaaatgtaatagaaaagaagtagctctgggcttcgtccagtatgttcctgaattgtgatgcagttgtctgtagtaaggatatcaataactgtggaagtggcgtttccctctaacctcctgggaacaacatttttcactgtgtgggtttgtctgtgatggagagagctgcaacaaaaactgtggttgccaccatttttacataggatggagggatagatacttttcattgcgattcaaaataagtaatttctggcagaaataaaaaggattctcttgctgtacttattccatagctagtgattaatattaatattacacctccataaccagaggcctttactgtgcatgacattggcaatgatacatcctaaaaaaatttgggaagtatgaggatgcttgagatatgccatgttttccttttttcctttctaattttctgctttcctctctccttttctttgtgggctgtgtgtgtgtgtgtttgtgtgtgtgtgtgtgtgtgtgtacactttggtgtgtctcttaacaaagtcttttcatctcaagctccctgatatatgtggaatttgtccacccctctctgcctctgttttctctcgtagcttctatcattcccagcgtgaactataacctcctaactggtgtcttcacttgtgttctgtttccctattgttgattcaccgcatatcatttaaaagatgttttacaaatgaaaatctgagcattcctgttgcttaaaaatatttggtggctacctcaaatccttaatatttctaatcttcatgattatgttcctgaaaatactctctagctgcattcatttactagatcattagattttgtgtgtttttggctgtcatcatagtaagatatttgtgtcatcagtacatatacacacacatacacacacgtgcctaaaacaaaagtttcacaaaaatacctaccttttctacacacacatatccacgtacctatgtgacatagatgtataatatatgtgtgaatatttagtatatattactccccattacatgggaccaggaaatatgtttgtcctatttgggtacttatggccaacattttgaattttgcccagtacagaataggtactcaggatatatttgtttttaagaacccataagctaaaataaactttacaaaagaatgctatgttaagaagccataagctaaaataatcttcataaaagaatgctatataagtgtttcaccctcaggagtttccaataaaataattttttgtaggaaaagcaaagctaagaaaatattctctatttctatttattgatgtgattttatgtgttaactaaatgtcacacttataataattttcctttgaaatcaataatagtagttatttcagtgatagagtttcacatattgcagattttaatatatactatacaaatgtaggaaaacaaaccacattaaaaaatgtatgtgttgctttgtttaaggtagaacattacattcattttgttctgatatgtttggctttaggcagagatatattttcatttactagacaagattcatcattgtagaatccattaactaggcactgagtacctaaaagctttaggtgtttagaggatgtttggaaaactgatgaaatgggaatctgagctgcacaggtaggatccatttaatttggggcatgcaggagtcagccttaagggagattcattatgatggttaataaaaccatctagcatatgtaattggtgtgggattgtattgataaacttcctttctagagtatttgagctggctattgagcctttcagctttcaatgttggataaaatttatattagcctcaagcattaaaaccaagtagcttcatgtgtttactatttgttggtctttatacagtccaactttataccaggatttgaataaggcaaaagtgcattatttaatcttcagagatatcaacatatatccagtatggtgattgatagatttcctaaagtcatctattatttgcttttcttaatatcaactgtggctattgtctcttctaaaattatttaaaagaagaataggattatttcttagtgcttttttataattaaaaaaacaaaaggaaaatagactcaaaaattgatagtagttggggtccaatctttgcatttttctattaaactcttgaactcatatggataacatgttcttcttacaattacttactagttaggaatcgactaagttgcaatgaagagatttttaaattatggaaatttgaaagaattcttgaaaacagttattttaacaattatcccagtaaattgaaataatttatagcatgcttttctatttcctgcccagcctttaaacttttattttgcagtaatggtattatttttctttctcagcaagatatggagatgataattgtttattccagccatgatcttcatatttgtgatccttccctgaccagctgtgctagagtatgttgttagtgctattctgggaatcatgtaaaagacttggtcacttaatgtcaggaggtgatcttggataaagtcacttagaaaaaggacaaggcaactcctaatcttaagaaaaaacagatgaataagagtataatatatactcagtatataacagctgccttttctctcaatcttgccagcatttgatattttttttttggtctttttgctagccattctatttgtagttctctgatgattagaaacattgagcatttttttcatatacctcttggtcatctttatgtcctcttttgagaaatgtgcactcagatcctttgcccactttgtagtaggattatttgtttattttttgctgttgaattatttgagttccttgtatattcttgatattagtcccttgatggacacatagtttgcaaatattttctcccaccctacagatagtgcaatgcctccagctatattcttcttgcttaggattgctttggctgttcagggtattttgtagttatgtacacattttaggattgttttttccatttctgtgaagagcattattggtattttaataggaattgaattgaacctgcagattgctttgggtagtattgtcattttcatggtattaattattgtggtccataatcatgggctatctttccatttgtttgtgtcctcttcgatcactttaatcagtgttttctactttttttgatagcggtctctcacctcgttggataaatgtattcctaggtattttttttggtagctattataaatgagattgctttccagattctttttcagctggtttattattggttttaaggaatcctattgatttttatattttgattttgtatcctacaattgtactgattttgttatcagttttaaggggttttggtgcagtcttcaggtttttctagatataagatcatgttgcctgcaaagagggacactttgacttcctcttttccagtttggattctttttatttttctcttgcttgattgctctgtctaggactttcagtactatgctaaataggagtggttaaagtgtgcattcttatcttgtttccagttcttgaggaaaggctttcagctttttcctattcagtgtaatgttagctatgggttttatcatatatggcctttattgtgttgagatattttccttctgtgcttaatttgttgaaggtttttattaggaaggtatgtttgattttatcaaatgctttttcctgcatctattgagatgatcagatagttcttgtcctttattctattgatttgatgtatcagatttgtcaacgtgcctatgttgaaccatccttgcatctgtgggataaattccattagattttggcacattatctttttaacatgttgtaagatttagtttgctagtattttgttgaggatttttgcatcaatattcatcagggatattggcctgtgattttcttttgttgttgttgttgtgtctttgtctggttttgttttcaggctaatactggccttatagagtgagttagaaagaattccctctttttaattttttggaatagttttagaagaattggagttagtttttcttcaaatgtttggaagaattcagcaataaagccatcagtcctgggcttttctttgttaggagactctttattacttattcaatcttgttactaattaatggtttgttcaggttttctatttcttcctggttcaatattggtaggttgtatgtgttcaggaacatatccatttcctctaggttttccaatctgttgccatgtagttgttcataataatctcgaataatctttcttatttctgtggtatcagttgtaatgtattttttgtttctgatcttattttattttctttctcttttcttaatctagctagcagtttatcaattttatcttttttaaaaaaacaactcttcactttatctttgtatttttttagtctatactttgtttagttctgctctgatctttattatttattttcgtctaattttgagattagttttttcttgctgttctagcttcttgaggtgcataattaggctgtttatttgaaatctgtctactttattgatgtaggtgtttattgctacaagcttccctcttagcattgcttttgttgcatctcataggttttgggatgttgtgtttccattttcatatgttttaagaaattttaaaattccttcttaatttcttcattgatcaatggttgttcaggattatgttgcttaatttacacacatttgtaaatttcaaacgtgtttcaaatttcctcttgtcattactttctatttttttccattgtcatttgataagatgtttgatatgacttagatttttaaaaattttttgagactttgtcttgtggcttaatatgagatctatcctggacaaaagctctagtttcttataggtggactggagacagaaaaatcagtctttggcaaagacaaacagagcagataagtagaaagaagtgagcaatattacaaattcagaaagacagaatgagttgctggtttcattgttccccatgactatgttaattcctcttgaaaggtatgtgtataatctagaaaacatgagatatttctgaatccagaaatagtaggagtagcttcctgttgctaatggcgctgtgctgtcagcttactaatcttggttgctaacaaattatgtcagtgatgttgtgatcctggagcaagctgttatactgaaactttccaattttccagacagctttctgtcatagaagaggctgtagtttcctccatggtgcacttctgaattgtgacgttaggagttcttcctgaaggctctgcctagaatatttttgttcatttctcccagtgattctgtaagtcatttaacaccctgtgatacacaagttgggtctgaaaataccaagtgtggattattttctctgaaactgaactttaacaaatacaataattatagcatttagaaaactataaggtgatactatgtatttattcattcatatgtgcttgagagtcattggtaaacagacaataccctcatggaatttacatgctagaggaataagacagacaataagcaataaacagaaaagaataagtacataatatatcatgtgaaaaggtagtaagagctaagaaagaagaagtggaaagtgtatctgtagttttaaataaggtaggcagggtaggtgacatctgagcaaagactcaattgaaggagattttgtattgttatttcaatattgtttcattatacaagcttcaagatgaaacttcagtttctctttaatattttatctataataacactatataaccttttaaaaatttcatatttgtctcatatttgtcaagtgtcttcattcatcttcttcagataacggatatgcaggctttaatacaagtatttgcgcagattatcaggtggttagattttcctttcttatatctcatttacagccagagcaatttaagagtaggttgaaactgataaggaattaagtaaagaccattaggtaacagttatagaagtaatactttaaattttggcgatcataacaataacaaaagagaattttgcatagggtgaaagtttcagatgattatgagtagcaagaaagctcagaaatcataaatgttgacaattcttagaacgtatgaatctcttacataacagcaaagatcattccaatttgtcaaaacctctccaaatggaacagatattttatttgtgatttactaaggccaatgaacatgaagtttttactttctttgttgtggccactccacctttatttgcatggcttaaagttttcactagatattttcgcccttttatcacacgtcacattattgaccaataatgaacttcaaatttactaaaaaccctgtcattggtacttactcaacggtgcctttctacatatttgaaattttaattttgcaaattctaatagctgaattttacttttttcattaaattttatcttgttagattggagtcatttttatgactattgaatctaagtaatccctgactcttttgtcagataagcaatttttgggttcccttgttgtcttctttacattcttctctactctcattcatgagactaatgagtcttcttaaatgtatcaaaatggaagactaaatctggcagcagacaccagaaatgtttcactgactgcccatcaaaatcccacactcataggaatgatactctagacatttatacatcgcccagccatttgtacgtaagaatgaccattctgccatttatacatttactggtgtaaagtagtgttcccactgagtgaatgaacttctgtgtgattcacttgtgtatatttgctacagcattttttctctttttaaagtggagtcataccataaccttgaaatgctattaggattaaataaaataagttagtaaaataatccctaatatatattaaatgtcttatgaatttaagttctcatttctcactttcccttcttttttgttatataaatgtcttctttgaagaaacgtttattcaggtcgtttgcccatttttttattgagttgtgtgagttctttataaattttggatattaaccccttaacagatattttctcccaatctgtaggctaccttttcatttcgttgattatttactttgctgtgcagaagagcttttcagtttgatgccatcctacctgttttctcttgtgcgtgtgttttttttgttttgttttgttttgttttttgagacagagtctcgctctgtcgcccaggctggagtgcagtggcacaatctcggctcactgcaagctccgcctcccgggttcacgccattctcctgcgtcagcctcccgagtagctgggactacaggcgcccgccaccacgcccggctaattttttttgtatttttagtagagacggggtttcaccatgttagccaggatggtctcgatctcatgacctcgtgatccgcccgcctcggcctcccaaagtgctgggattacaggcgtgagccactgtgcccggccattttgtcttgttttgtttgcttttgttgcctaagcttttggtataatatccaaaacgtcattgccaaggccaaccccaaggagctttttcctaattttcttcttgtagttttataatttcaggttttacatttaggtctgttatttattttgatttgattttttgtatatggtataatataagggtccaattttagtgttttgcatgtggatatccagttttttcatcactatttattgaagaaactatccttttcctatagtgtcttcttggtgacctgtcaaaaattagttaatcatatatgcctgggtttatttttgcactctctatgctgttccattgatctgtgtgcctgcttttatgccagcaccatactggggttttttttggttttgtttttgttttttttgttttttttttgatggagtcttgctctgtcacccaggctggagtgcagtggtgcgatcttggctcactgcaacctctgcctcccgggctcaagagattctcctgcctcagcctcctgagtagctgggactacaggcatgtgctactatggccagctaatttttgtatttttagtagagacagggtttcaccatgttggccaggcttgtcttgaactcctgacctcaggcaatccgcccaccttggcctcccagagtgttgggattacaggcgtgagctactgtgcccagtccatactgttttacatactatagctttgtaatataatttaaaattaggcagtttaatgcctccaactttgtttttatttctcaagtttgctttggctattcagtgtcttttgcagttctatataatattagcatttttttccatttctgtgaaaaatatggaaattttgatagagatcgtattgaacctatagatagctttaggtagtacaaatattttggcaatacttacttttccaatcttgtccaaagtgaaaaggaagaagcaaaattatcccttttagcagatgacatagccctgtatatagaaatctttgatgaatccacaaaaaactgttagaactaataaatgaattcagtaaattttcagaattcaaaatcaacataggaaaatcaggtgcatttctttacaccaacatgaaacaaaaatattgaaaatgtattttttctttcaaaacttttactcactttctcatcttacagcaattgattattaactgaaaatcccaaggcacctaacctcatagccttatttattttctaattattttattattgaaaaattaatacatgaacaatcagacatacaatgaaaataaatctcactctttgctatagaacctccatccctctcctcctagcaaaataaaataagattttattatgctagaccagaactatctagtggtcttggaagtcactaaactgtaaaaggaggggaaaacgacataaagataaagaagataatctgctaactttgttgctttcctaaactgagactttaattaaaacaattagaccttgggaatttagcctatcagtctcttatatattgaccgaacaatgtcagatatagacattggtttgcagattaagttcctacaaacatatgattaagaacccctttaaatatgctcttttgtatgaagcacttttcagcataggtacactatttttttgttttaaatttataaaatagaacctcattttgtttgttttcaaatagagctcaagcaaagaggttgccatgattcttacaggatcagaaatagagaaagcagaatcagattgaagagagtggttggctgagatacatttatcaatttgattgaagagacactacagttgtattgtttaacatgatggtttttggaagtacaatatcaggataaaccataataggtatctcattctagaaaccatctttgcaaaatagtttttccaaagtctagggaattaattcattatggatttgtgttttgattagttaaaaatagtattgtatttatcagttataggtacaaactgggagattcttcgtttgatttactggttttaaaacaaagatctttggaaagatttatctttctaaaacaacagaaaagaaagggaagatgggggaatacgtggtgtcttagcctgttttgtgttgctataacagaatatcaaagattgggtaacatataaaggaaagacatctattttttacaatctggagggtgggagtccaatagccgggtgctggcattgaggagggcctttttgctgtgtcatctcatggcagaaggcagaacagcaaaagagcacaagtgctcatgagagagaggaaggaggccaaactcatccttttatcaggaactcactcctgtgataatggacccaatccgatgataagggcattaatctattcatgagggcaaaacgctcatgacctaattaccaattaaaagtctcacctcctaacactgttgcattggggattaagtttacagcacatgaactttgggggacacattcaacccatagtgtatagtattcaagtaaaatctgaattcattcttatttagttagaaagtcaaaccaaaacatttccaccaattcattaaatatttttttggccattttttctgacttttcaattttatatcttaaccagaaagggattgatctaaacaaaccttaaaacacaaagtgaattttgacaaagtttatgagtgtttgcatattttctacaaggttgtatttcttcttccatccacttttaaattaattaaatacatctctttctttcaataatttattcaacaaatatttactgagatttcacaatattctaggcactgtgaatacaaataagaaaaagctgtttgccctcatgaagcaaacaggaggaagaacgatgatcaccatacataccagtaaaacatataaggagacagatgctgataagtacaatggagaaaaatggagcaagaaagagagaaaagggattggaatgacgggctatttcaaacaggttggtttggaaagacttgagtggagacttaacagaggtgagagagtgatgcagtgctgaggaggaaggctttgcatgaaagagaatagcaagggcaggccctgacaccaaagagggcttggcaagtttaagtaacagcaagatggccaacgtggttgtaaggaagagctgccaaggtggactcaaagaaatagccagggtcaaactgcggagggtcctgtaggccactgtcagcacattgacttttattctgaggatctgaagaagtgacattatctcacatattttagaagagtcaacctggctgttgcattgagtgtagagcacagaagcagacatgagggtaaaactagagagacacacacacaattgatcatcaatatttgcaggtttcatatttgtgaatttccctacttggtaataacccccaaatctatacttcatacatgcattacaacacatgcatgtacaatgtgttgaaaaatttgagatgcacaatgcacatgttcgaacaaggtgattctctgccctgctttctggttttagctctcatgcagtaaacaagtgtccttattgcagtctatctggggccacatttatttttgcattttcatgggattttgttgtttaaaattgccctgatgcaaagtgctgaagtgctgtctagtgttgctaagtgcaagaagctgtgatgtgccttacagagaaagtatgtgtgttaggtcaatttcattcagacataagtgatagaactgttgattatgaatttaatgttaatgaatcaacaatgcagtatgcccccaaaatagaggaaattcactaatatgcacatcaggccacaaaaatgataaattaacacttatgtattgaagctatggaaaaaaactcaatttgtgaattcataagatgatgaccaatagaaaaagcatacggaacaacattgttgcgtggctaaatgaaggccatagaaaatttatcatcacattacacagggtcaggagaatgttaaattcttctgggctagtgctggctaactcacagatttcagaaaatgttaaacttgcatgagattcaggttctgcagataaggaggctcaagaattgaaaaatacctgctgtgtcttacgcagtaaaagggtcatgtgaaagaataggttcacaatgctgataagactgcttgttttatgatgacatcagcaaacaaacctatgtaatgcaaatgccctctaaagcccaggctttaaatcattcaaaggccatgcaatgaattatttgtgagaaatatgtattaaataaagtgtctttaaacagaagcacacataaaacaaggttatgaattgattgtttgacaaaaacatgaccagctactgaaacctaaccctgtattttccatagaagcaatggttctatatttgttcattcagcatctgcaataactttttagtacatgactactacaactaatgagaatcaactgtatataaacatatatatttttgtatatgtgtgttttggactcaattgttttgccagcccccaaccaaattcctgtgttgaaaccctaatccccagtaggtcagaatgagactgtatttagagatatgaatttaaagacacaattaagttaaaatgaggcccttaggattggccctaatccagtctgactggtgtccttgtaagaagagattctgacacacaaaagagacatcagaggggcacacacatacagaaatgaccatgtgagggttgaccatctgcaagccagagagagaggcctgagaagaacccaactctgccagcaccttgatcttgaacttccagcttcaatgactgtgagaaaatagattgattttattcacctcgtctgtggtattttattatggcagccctagcaaactaagtcaacatcaggcacatcatgttggtgtcattgaacagccatatgttttatggtggtggtgtgaaatttatgagacacgattaaatttgtgtatattttgaaaaaggagctaaggggattttctgaagaattggatatagcttattagataaaaatggaagtttgcattcaggagaaaatgtattcctattttgttctttcttactattcacatgttgcaccatttttttcccaaagaaaaacaactaagaaaggaaaaaatcttatgatgtgaggataaaaagactgaccaccctagtcctatcactgaaacatttccagtggaatcagtaaaggcatgatgtgttttaggaaatacgatagggttgtttgtgacaatgtaaatgtagttgttcagggttcaattttaaaaaatttaattttaaaacacttagttttgaagagttagaaatatttgcaaggaaaaatggtttcttatttttgattaatattatttttcatggttctctaataagaagaaatcaaacttaactgcataaactataattaaattcaagagtaaatgagtaatgaataagttttaagatctaatgatatatttactctacccatgacacaattatctgaaagcaaattgattattggatataaggactgttttagggaacaaaagcgttgaaaataaatatgcaaacactttctttgtgttgtggattaaaccttactgtttttaaagtattataaaagttcaataataattacatacttagaaaaatgtactttgaaaagtaatttctgtgcattttatttctaccattagtgttcaatttcattatttggattaacattttaatgtaataaagatatatttttgcgagatagtatcttgggacaacttttaagagaaagacattttcatacattcagtttatacttttttgtattgaaatgcaatctacatgtttcactttaataaggaaccaaatagagtcttaactttgcttttgtttccttatctccaattttcattgtggttcttatttatattaaggggattatgtggctactgtaaaatattcttttcataataattgtccacattctaaggctgtattcttctcttcatgttcatatattttgtatttgtttcatagtattccatttcttttatagtgaggaaaaaatctgtttgaagtatctaagtctctaaccctatgattaccttggcaaattaacatttttagctgcagaatagttgttttctaacaaattcttcttccttaattcttttcataagttaccaagtatctcttacagctcccaacaagccctacatcttgaaaatatttaaatattttcaagatcttaaaatatttaattgatattcaatgatatcaattagaatttctgatcaatgttattttgagaaataagagctgcttgatttcatgtagctaaatgttacttttataatttttattttttgtttttaatcttttatctgaattcagacatctacttttcactcttacagctagctttatttactccttgtttttgctctttttctgccacagattaagttttatttctgttctagaaggagcttgttcttgaaaggcttactgtctattgagttattattcacttctgatatttacatgtttaattagcaacactttataaattaccttcataaatattattttatttgaacctgattgatttcatcctgtgaaatgaatgggagattattatcttcaatatgtagataaggtgactgaggttcaaagagattctatgacttactttgggcacacagctgatggaagtggcacgggtagacttaggaatcacccagtgcttctcccttacaagtcttgggctctttccactaccatcctattacctttgcaggcaattgaagcttaggtattctgcaataagcaatacttgcaagattatcaatctttagtataaccatgaatataattcttaataaataatgctatgtaaattaatgtaggcatatgtgaaagtgttttgtgaattatgtctatgcatacacagcatattaatatttcgtctggcaaaatagcactaatgtaattagatataattaagaaatacctgatgccttcaaaattatttcgggccagcatttctttattttcttataaaatataattttggtttatatcaataaatcacacataccttaaaaagatgtatttctacaaagcttatatattaagtagaatataggcttacattattttaacaaagaataaagggatgatggattaaacaaatctcatgtctctctcatgtaaaagtgcaagatgagaacctgttgtggttgcatgggaccggggagggaagggatagatagggaagctctgccccttgaggtcatccaagatcccaaatttcttctacattgttgcttcaccaagcgtttcccttgtccgcctagtcaaaactcgtcactacaaccacagtccaacacaagggaagggaggaagaagtcaaagttacccgcagtggcacaaacctcttctgctccacatccaggaggctgtttcttatttgcatagcttttcctagctgccatgcattcaattaaatatttagggattctgttactaaaagagtaggatgagagaatgggtattggttgatgaataccgttatttcctagcctgatcactcagatacaaatgagtcatttatttattttttgatacatttaaaacatacttttggacatacagtaatccaaagtatttttatattacttgacatagctcaaggaatgtataattctctcttttgggccagttaaatctaattgttatctggcaacgtatacactaaaaggtgagttattaatcactcctcccctgacttacacacaatcacttgtatagtgggacaggataccacaaagatacttcttttcagaaaagccaagaatattatacaaactaaagtcattggttcattagagttatcaaatcctgctgagcagtcagtgctagctcttcctaaactaaccatcattattctgcctttggggagtaactattttgttctagttttctccgtggctcctggattttccatttgggaagtttttgtttgtttgtttgtttttttctattattctctatggattcctgttaggtgagtgttagagttgtcttttccttcttcggaaaagacaaatttcacagtccatttcctgctagtacagatttggagacctagagattgctttgaaagtttaaaagacacaggctttttgaaaatttcccttgtggtttctttgaaaagacaatttccatcaaaatgtaatcgtttcagtcagttccatgtgcaggtaagcacaagcagagattttatttaaccatagatattaattctgaaatctcgtgtttatttactagtcctgtccagctaccaacccacagctgacattacagctaccaggaaaagaatgacaaattacaaaaataacatttgtaaaggtataatacaacagtaaggactcaatatcagagagggcagaaccattctgaagtgatctgaagatcaccagctgcttaaaacttcctagaggcattggccaattctgaatcagggcagagaacaagctcaatgcaagccgaggctatgattaaggaaaaaaaaaatcaacaaagctgttagttgtcatggaaagctgactgacaagttataaacttgagaggattctaacacatggctgagttctgggactactcaagaggtcaaggagccagatcaaaagggaaaacaaaattttctacagatctgtgaatattaaggaaaaaaaaatatcaccaaagagcgagagtggcttactcaagcacacagctaatctccctctgaatagaagtgccaggattgaaggtcaagtggctaagagctgaccttggaacctgtgacagtagagcttgatcttaaaatctttcagggttgaagagaagagtacttggtaaaaaccatttgtcaaaagcccaggacaccatgactgaggagtaggaattaatcagatgtaaacagaggcttagcaaaactattaccaaatcccaaaactgttcagtctctaattagttgtgatcatcagttccttcttacatttgtctaacaaaggaaatgggcaaccctctctaatggaagataacatcatatggaacctctgtggttctttcatgacaatttccaacatataataaccattactagatatgtacaaaggtaggaaaatatgactgacaataaagagaaagaaaaatgatccaagcacacccatggatgatctagatattggaggtaacaaacaagaacttgaaattaattaagaatgtataattattttaattatacttaaaatgctttccaggcatggaagcttatgcctgtaatcttttggaggctgtattagtccattttcatgctgccgataaagacatatccaagactgagcaaattacaaaagaaggagatttaattggattcacagttccacatggctggagaggcctcacaatcatggcagaagatgaaaggcacatctcacatggcagcaggcaagagaagagagcttgtgcagggaaactccccattttttttttttttttgactggagtcttgctctgtcgcccaggctggagtgcagtggcatgatcttggctcactgcaagctccgcctcccggtttcatgccattctcctgcctcagcctcccaagtagctgggactacaggtgcccaccgccacgtgtggctaattttttatatttttagaagtggggtttcactgtgttagccaggatggtctcgatctcctgacctcatgatccacccacctcggcctcccaaagaaactctcctttctaaaaccatcagatctcatgagacttattcactatcatgagaaaagcatgggaaaaacctgcccccatgattcaattacctcccaccaagtccctcacacaatgtgagaattcaagatgagatttgagtgaggacacagccaaaccatatcagaggccaaggcaggaggatggcttcagcccaggaatttgagaccagcctgggcaacacatggagacccaatttctacaaaaatgtttttaaaaaattagccaggcatggtggcgcatgcctgtagtcccagctactcaggaggctgaggagggagggtcacttaagccttggagttccagacaagcctgggcaacagagcaataccccatctcaaaataaataaatacatacataaaatgttaataaaaattgaggaaaagttggaaaataaatgaaggatgtagacttttaatatagaaatgctatatatgatggtgaaacctcatctctactaaaaacacaaaaaattagccaggcatggtggtgcacacctgtaatcccaggtacgtgggaggctgaggcatgagaattgcttgaacccggaaggcagaggttgcagtgagccaagattgtgccactgcactccagcctgggtgacagggtgagactccacctcaaaaaaagaaaagaaaagaaaaaaattctatctacgaaaagattcagacgaacattcaagagctgaaaaaatgcaatactaaaattaaaaatcaataaatagtcttaatagcaaacggagaaaatcataaaatagaagatatttcaatagaaaacatcaaaacaaaagcatctagagagaaaaagctaaaaatgaaataaaaatgacaaaagagatgtgtgtaacacactcaaaagatcaacttaatgaaagctacactctgaaaccatctgaaacagagaacagtctttttaactgatctttcctcatgagaacaaattgcaatgtgactgagagaggcttgggagtcccatctcatcttttgctgtttgagatacaggagctggctagttttctaaactaagtgaggccccaagtgaagttgtcttcagccaatataaattgaaggtaatgggatgaaagacatacattttagcaaagttgtattctcttttgtctctcctttcaaatgaagtaagtcttgcgaaatttatttctttgcgacctcttttaaagtggcaacaagcagccaagaagcaccaccattttgactttttccaatgtccttgactagagctgtgctgtctaatacggtaagcagtaactatttgtggttacttagatgtaaattatgaaaattaaatgaagtttgatattcagtacctcagttgcagtagtcacagttcaactgctcaatagtatcaaacagcacagatgtaaaaaaatttccaccatttcctatattgatataaggttctattagatagcagtaacctaaagttatacactcaataatcatacaattttccttttaacttttactggatgcttaccatggcatagttaccagttttttccagcttttcagctggaaatactaagttaagagctttactttagaataactggccaggggtgcattggttttgctggaatttaactatcagaaactacatatcattccttgaaggtccatgttggaagagatgattctttcattttttttcctggtataataaggatggctgccacttttctcagagcctagtaacaagtgagtttggtggtgtggaggtccaccaatcagcataaggtggtatttaatttctctattttcagatgccacccaagccttcccttctgtacactgtttctgagtttagtgtccttttagttcagccctgccatagagcagtcctccatttttgaaaaagaagagactagtgagagctgatcaccaaaaaatctagttgcttttcgcgcagattttcaactagtttccctattttctatttcacttattctctgttttcagggttcaccctgtctcatttttgagcctttttttggcatgtagtgtatgatgatttcctttggctttctttatgcttttggatatttagatttgaggtttcttctatatgttgcctttcaccacttggccaccttcttttcagcttcattattttattaaaatttcctattcgttgccttcttctctggtattttcttgtcctcaaggggaccctcagtctttttttttttaaccctttcacagacattttagaatttttaaagggaaaggaggtaaaaaaaaaatgtttactactccaggttgaaccaggaatactgcattgttttataactgagctgtgaataataggcatgtgaaaaatttgtgttggtaggaactgatatgtactatatagtcaatatattctgggaactcacattctttgaaatataaataattctatgccatacttggtatttttcacatgaaaaaaactgaaattccaatagattaaatcatatcctggaggtgcaagagcttaataagtaacaatctgtttatacttgattttgtcatgcttccttatatcataatacagtgtttaaaggctcaagaatttgtgcctgggtttgaattccagttgtacaacgcaatagctgcacttaatttcacattctacttaatttgtctgtgtctaacttttgtttgtctctgtgtgtagaatattgataatataacagcagtatctacctcataggattattggaaggattaaatacattaatatatgtaaaagattttgaatagtgcttgacatacagtaagttctatagatgtgttagtaatttctaattgtattactttgtgctccatctatcccaaggaagaaaagatattgcttctgcttatagatggtcttttaaagctaggaaatacgacattaaaggtgtgacgtctacttgcactttaaaaactctcgcctttctagaactttctgttactaaagcttgaaaatgaaagaactgttactgagtgagctaatgaaagaaaaacatgctgatttcttctacttttaaaggggaaatggatgatgtaagttctgaagatagatctctacgattttttttacatcctctagattacttttagtggtttttccatactattttcattctactcattctaatttcaaaagtccttctaatttgtatatttgaattagtatccctagaaaacattttctccataaccaaattgatgtagaaccatagttttcaaaatgttattgcatgggtcataaaaagtagttgtggggactttaaaactatcttgaaacaatcttcttgtttcatataaaagccaatcttcttggcttttatatttcagattaaatccaaaccactcatagcttgagtaccatcagctgttggcaaaacttagcttcttggttctatgtaaaagtgaatcattttgtaaacactctgacaaccaagatataaatcctttggtttacacaggtgacctcatgaatattcttttccaccctttgtgtgtgttagagggagaaaataccgcaggcattgaatattgaaattttttctaatcattgtaactggaaggagacgctgacagatccattctctggacatgtgttttaaagttaaggaggaaaagacatgaaaaaataccgtataggctttgctgaaaccaaagcatttggagcacagtttaatacgtttgccaaattttaaatacagctgggttctcccacagtttctttaattggaagcagatttctgtgctaattctgtaacgtgaagagagctctaacagtatttctttcctaaaagtagggcatatatttgcagtgaccacttctaacatcaacaactccttaaaaatatccgacttagcaattttcaatgcgacttagaaattttcaagagttttcagtagatttattacctcatgtggttttatatacttaatagttaagtgtataaataattaaaattatttaataactgataattaagttcactgggtattttgtttttagaaaaaagtggatcgtatctaaagaattaaaaatatggaaatgttcatattgtaaagtaaaagtccacattctgcttgaatgtgaaagacaaaatgtttgtttctttcataagtttaaaaaatttaccaagttcttaacattttaatatgataaaatttagtggaaaaggctaaattgaaacaaaaatgtatttatattatatactacatatattccattcaaaactacaatactagtttctgagtcaccaaatgtggaaattaatgtcaatatgatgaaaatacaattttggaaaatttatctgtttttaatacctatatattcactttaacactcaatatattacatttttaataagcactaatgatattaatagtaatttgaaagaaacatattacaaagttttataaagaaagcattaaaataggtttttggaagattaaccttgaggcattatttcagtctgctttccaattacatattggaaagaggggtacagcatctactttttaatgctgctcttactttggtaagaatctaggtagtgggtaaaaaataaaatcatttgaaatagttttttatttattgaacattttttaggctgtacctataaaatatctttatagcaataaatacttttatagcaataatctacaccagatgtgttcatcatgactttttaaactttctaccctttcaaaattacatatctggtttttgttgacagtactattataacttagagaatttacctgattttaatagcacagcaaaagagctgttttaggagaatgagcataattgaaatataggcatttgctaaggagagtctataaagaccattttcattaagacacaaaaagattccccaaatattagtgtaagctctaaaaattgtgccagcagtgtaccctgagaaggcagttatttccttattattatgcaggcacctaaataaaaggtcgatgtatgtatcagttttttccacaagatctttattgctttctcttggtctttgtactgttccctttgctaatactgcggtatcttaatattaatctattttattgtaagctttgatatcagttgagctagccctcccatttttatttgcatgcaagcgtacttagctattcatggctctttcaatttcatttccattttagaatcagctgtatagtcaaaaattctgttgtgatgttggttggtattgcactgagtctgtagatcaatttgtgaaggactgacatatctatattgccattcatgaacatgatatatatctccacttgcatcattaatttctctccataaacttttagaattggtgcatatcttttctttgattttttccttgttgcctaatttttgtacactatgataagttgtaccttatattttgttactgatgtttaaaaataaaattgattatggtatactggttttataaaaaatggccttgctaaactcttattaattccatcaatttgtagattatttctattttctatttcaaaaagctacatcatctgcaaatattgacagctatcaatactgacatgttgaataaaaatggtggcatgaatatctttgtcttgtgcttaatgtcttaccattgcagatttagcattaagtaattgcagaaaattccttttgtagctaccctttgttatatggaagaatgtgcccatttgtttctagtttgttgagtttttaaaaaatcataaatggatgtcgaatttcagtaatagctcttccctttaaaatgtttacgtggcaaattttattgattgatttttcaacataagccaaatgtattggtgaatgtagtaactcattgctttttttaactagaattttccccattatgagtgaggttgagtatctttcttttagtgtgcttattggctatttggatatccagtttgtaaaatgcctgttcaagtcccctctccctttttacaaaatcaggttgcctgaccttctcgtattgatttatagatgctcattatatattcctgatataagcccttgttagttattcgagttacaaatatcttctccctcacagcaggcttgacttttcactttgttaaggatgccttctggaaaatgttacttaattttaatgtgatgaagttgctcaatttttaaattaatggtttttctggtaatgtttaagaagttttttctttctttctttcttttttttttttagacgagtctcactctgtcgcccccaggctggagtgcagtggcctgatcctggctcactgcaaccctctgcctcccaggttcaggtgattctcctgcctcagcctccaaagtagctgggattacaggcgcccgctaccactcctggctaatttttgtattttttgtagaggcgagttttcaccatctggccaggctgatcttgaactcctgacctcaagtgatccacctgcctcggcctcccaaaatgctgggattacaggcgtgagccacctcgcccggctgaggtcttttcttactctgaggtcctattgattctcttctatatcttttagaacatttactgttcttccttttaaatttacatatataatcagtctggaattcatctatatggtatgaaatggaaatatttaatttcatacatatgtatattatatatgtatataaattataaatatacatatatatgtaaattatatataaagcataatttccattttatttttttccagaggattgtttttctttaatccttaaggattcagctccttacaagggttttgttggaggtcatggggcagcaccaggaggtctaaatcatggtgggtgcattcagtacttcatgagatccattctcaactaacatgctgtgaatggcacaactcaggcattaacgtagcttcacatataccttgggaagcacgcaggagtcgaagacactccctttggaaatgtctgatagctgcagcctcttctgttttgaatgacgaacttcttagtagccttgtccttgggcatacattgggcacagtgtctgcagcaaataggctgcatgtggctgtgcctctttttggcatgacatggttccttcttttctttgtcatcttgaaagcaagaacctgagactaatttcatatttttttttgtaaattacataaaacacctttattattgttttacaaggtcagtgtttaattacatttatccacatttccatccccctttcttttcttttctttttttccttttgaacttttattttagattcagggagtgcctgtgcagattagtcacatgggtagattctgtgtctctggggtttggtggacagattacttcctcacccaggtaaggaacatagtcctgatgggcagtttttttttttttaattctcaccttcatcccttttcttgtgctccctttccctttgcctctcttgagcttccgtttgggcttcaggattacattcatccttgctactggtggggcactggttccaggaacaccactcccctctctcccacgtggatacccaaatcccagcataatcaaatcgtgtagttgaggaaccctggaatatcgataagaggaacaactgtgtttattgcaaaaaaatctgcctataagtggaccgcacagttcaaacttctgctgttgaagagtcggctgtatttttcttatgcttgaagtctatcattcagaatttcctttaatagaggcttgatggttgtaaagtctcttgctttttgtttctttgaaaatgtctcttgcaccttcattcttgaaagcctttttcattagatataaaattgtcaattgaaatttattttattttagtacattgaaaaaacatatcatataaatagatatatctttaagatttcctctttgtagttttctgaatttcactatgatttgtcagctttttatctgcttgggtttcattaggtttttgaatttgtggattgatatatgttttaattctggagaattctcagccattatctacttaaatattgcttatacattgttctttttctctctttctgaaaactccaataaaatatatgttagattttattattgtatccttaatgtatcatcaaatcctttccccaacagttttatatttttgtctttctgagctttattcttgatgttcttgatattttttttcttaactattttgcatttcacaaagtttcttcaattggatccaatttgttctcaaatccatccagtttcttattttggttaccatgcttttcagttctatacattctatttggttccttttcaaatacgctgtgtcatttgaaaatactctgttacatttttccagcttggcttttattttcttttaaattctaagtacgattattttataattattatatgataattccaatatgtgaagtgtcttgagtatgtttctgttgggttttataaacggtgcctttctcttgagtacctagttatctttgactgtgggctagacattgtattagagaaaacattttagaaaagtattgaggcccagtataacattatgtttctacacagaggattttggtttgcttttgctacatgtctagaggtgctagaaaacctagatgcctgtgattccatttcaaggcttcacattttctaggcctttataatgcaaacttgagctgtaaagtacgcacattgggtagtttatttctggttcatttgtcctcttaggaagcaatcctttggagttgtaaccctggtatgctttagaaggagtgcttctaagcccaatatagccaatctttgaggatcatggacaccacagtttgtattttgacccctgcaaggcattttcactactcgtttctcagctttttctttatattggtaagtagcctcaatgcaaaagtagccttaagtactgggtgtggttttatgagttctcatcctttcctgaatctcatcccatatttcatcttgaatttataagttatttgataaattaaaaaagaattctttttaatagtttatcaagctatttttagttgttcttagcaggaggactgatctgaatagcctaccatcagcagaagctcctgatactctcttttcagtgtaatttcacttcaacagaagttgttggagtaacgaggatatggcacatcatcattttccttagtccccatacacaccgggagataggcctaatctcaccaatgacagtgaattcagaaaacacattaactttgaaatctattcatttaagatcaaatgaaggctgttaataagtaagtattctgcttacacccaaaaaagcacattttatgagttttatgcgtagtctttctagtgaactatttggagatttttttcttctgttttttcttgttcaatgcataccacaaggccagataacttattatggacaaatgcagttgagtttgagcacataattagagtgactgtttagcaattttaaattgatataagacattagcaattggaaagtaactagtgaaaatctgtctgaccataaggtgcatacaatggcatttagcctaaaggccatattctaagttacccaaaattaattacgaacttaatagtataactattagtgcattatactagtataaagaaagtgataaaatgtgttattaaattatttagattgtcatcagtttaaaattataaataaaagtaacagtggcatagtatgtcctcagttaaccagaaagcttgggtaagcatatcaaattactggtaataaactttactatatgtctcaatcatatttctttgttccttccttgtcaaaaatgtagattatctgtctaactgcttgaaaggaaaattttcttaatattttcccttaggacattcctgttttattttgtgtctatttttttttttaacactccataatttttaaagtaacctggcaggagcccaagtgcatggaatgaaaagtcattcttggacctattccatattgcaacaccagtctcttaaatcacttttatatgtaacatttgtattctattcagcaaatggtcatattacttactattctgttgaaacattgcataggtatttgcttaagacatgcattactcagaggataataaatttcttcttgcttaacatgtagcacaatgcatctaaatacttgtatttttatttctcaaagctaaagtcactgtttctctatcagttctttgccttcaaatacaaaagaggaaaatgtaattaatgaaccagtaatttcggagtgatcatcttttctcttccttagctcacagatatttgctgctatctgttttacgctttcacaataacttccatttgcatcactctttacatgactacatctgagagaagtgtacggtaagagttagaaatattactcttgtttagtagtagcaaaactcaagtgcaagaagctgagagtcacatggccctgttcagcttctggtccggtactccctccaataaccctagtttgtctttttctcttcatttttactgatttctatcccacccgtgcatttgttttgagatttcagctcttgtgacatcatctctgcaaattatgcattgagatttttgagagatttcttgaaatttctgtttaatgagtggtgttaatgtaacatatagattttaatatctggaaaacttcattttttatcatccactactttctcttaattaatttaacatcatttgcctttcttactggtcatagtataattctgaggtaataaggtggcatttttaatttaactattcatagaacttctgggagaaattttatgtctagttcagaaggcatggcagcattttaaatttgattgtggagtattctaaccaaatcttcaagagccgtaactcgaggtgaaacctgccaacagtaagttcttctcgtagcccaaggcttgtttggttttgattagttttactagacttcatttggtttcaattaaaccttgagacaggctagtgactttcatgaaacgtgggtttctcaagttagaaaataattcttttgtgtggacgagtgtaacgttttcttcactgaaagaaaatatctactcaaagataattttggaagattttataatcacattgcaaagagatttttatacattgaactgtctcatattatgtttcttaaaaattattatattgtattcttaaatggcaaaatgaaaatcactccatatgcttccaaagcaataataagaaatatttaactatataagtataacaacattttatatttaactgcatattgttaatttgattttaaaataagcagctattctggggagttccagaaatttttaaattcatttatttttctaaaaggctttcttttagtattacattatcttaggtcgtgttcaaatgaaatgattttcctgagtcgcaagtcctttattacttaaaaactgtaacaacataacatcactggatatgagttgaaaatcgtgcatagtatttttatgcaaaggtagaaggagaagcataaagttataaacatattgtataccctaaacaaagaaaactgtggtctgtagtcctcagagaaaaatctcaggtgtaagttccttttgtattccaaattttttttgatcctaaacaaaatcctttattaatccttattaaaaaaattccatgttgggtaataaagataaatagaaaacaaactcaaaagtagtgtttgaagtgatagaagatgtacatttctctttctgtgaattcataaaccctggcttcagatactattgatttttacccagaggcatcattaaataccccaccatctgtttaagattatgccaaaaatattgcagttataaatatagggcacgtgtataaaaattagatgtatcaagttaaggatattatcataatgctcttctatattctcagcatgaaacaaaaatattaataaatatgtgaatattctgcttgtaaatatgtctgtagaatttaaaactgataaataaatttgttcagaaatgtagaatttaacatttaccactcggaaaacaagagcagatcacctcttgaataagtgtcttccaattttgtttctaacacagcaaatattttatatttacaatttaaaaaattgaattctccaagtattatgttccaagatttaaataagattaacgaccccttcaaatatttttgttgagagctgtttattaataccttatgtggtcacatcaattaaaattaatgacatctggtatacaagtgaataatttctttacatattttatcatatttgaataaatagaatgaagaacaaagcactgactttttattcatactaccaggtttggatttggattctgctatgaattcatcatgtgcctttgggatcttttcctttctgggcttacctttcatcaaatggaaagaactagaagctctcaatggttctttctacctttaacattttattggttatttacaaattataaacatttagtttggttagcataggctgtatgtttatatataggctatataattatgtgctttatatctctagtaattaaaaattattttttttaccttgtaaatttaaatttatcatgaaggaagcagaactagttacattggtaaatatgttcattcactattacactattacttctgaatgaacacacattattttctctatagaccaagaactgtctattaatctattaaaatatattttctcaaaactgatcccagggtgctagggacacaaaattcaaagataaataagaaattaaatttggctgtgtgatgttgaaatgtaagtaagcaaataaaataaaatgtgatcaaactttatcagttcgagtttttattaccagcaaattccaattttattgacacagaattatctcagattagcaaaaataagtggtggtactttttttctttttattttttttattatactttaagttctggggtacaggtgcagaatctgcaggtttgttgcatagatatacatggaccatggtggtttgctgcactcatcaacccgtcatctacattaggtatttctcctaatgttatccctccccttgcaccccatgccccgacagaccctggtgtgtgatcttcccctttctgtgcccatatgttctcagtgttcagctcccaattatgagtgagagcatgtggtgtttggttttctgttcctgtgttagtttgctgagaatgatggtttccagcttcatccatgtcccagcgaaggacatgaattcattctttttatggctgcatagtattccatggtatatatgtgccacatttgctttatacagtctatcgtggatgggcatttgggttggttccaagcgttgctttgtgaatagtgctgcaataaatgtacgtgtgcatgtgtctttatagtagaatgacttataatcctttgggtatatacccagtaatgggattgatgggtcaaatggtatttctagttctagatccttgaggaatcaccacactgtcttccacaaaagttgaactaatttacacttccaccaacagtgtaaacaagttcctatttctctacatcctctccagcatctattgttccctgcctttttaatgatcaccattctaactggcatgagatggtatctcattgtggttttggtttgtgttactctaatgaccagtgatgatgagatttttttcttatgtttgttggccgcataaatgtcttcttttgaaaagtgtctgttcatacccttaacccactttttaatggggttgtttatttttttcttgtaaatttgttgaagttccttgtagattctggatattagccctttgtcagatggatagattgcaaaaattttctcccattctgtacgttgtctgttcactctgatgatagtttattttgctgtgcagcagctctttagtttaattagatcccatttgtcaattttggcttttgttgcagctgcttttggtgttttagtcacaaagcctttgcccatgcctatgtcctgaatggtattgcctaggttttcttctagggtttttatggttttaggtcttacatttacatctttagcctccaactttgttctttttgcttaggattgtcttggctatatgggctctttattggctccatatgaaatttaaagtagttttttctaattctgtgaagaaagccaatggtagcttgatgggaatagcattgaatctatgaattactttgggcagtatggccatttttgagatattggttcttcctatccatgagcatggaatgtttttccatttgtttgtgtcctctcttatttccttgagcagtggtttgcagttctccatgaagaggtccttcacatcccttgtaagttggattcctaggtattttattatctttgtagcaattgtgaatgggaattcactcatgatttggctctctctttgtctatcattggtgtataggaatgcttgtgatttttgcacattgattttgtattctgagactttgctgaagttgcttatcagtttaaggagttttggggctgagacgatggagttttctaaatatacaatcatgtcatctgcaaacagagatactttgacttcccctcctcctatctgaatatccttcatttccttatcctgcctgatttctctggccagaacttccaatactatgttgaatagtagtggtgagagagggcatccttgtcttgtgctggttttcaaagggaattcttccagcttttgcccattcagtatgatttttggctatgagtttgtcataaatagctcttattattttgaaatatgttccataaatacctagtttattgagagtttttagcatgaaggagtgttgaattttattgaagaccctttctgcatctattgagataattatgtgttttttgtcattagttcagtttatgtgatggattatgtttattgatttgcatatgtttaaccagccttgcatcccaggaatgaagccaacttgattgtggtggataagctttttgatgtgctgctggattcaggttgccagtattttattgaggatttttgcattgatgctcctcagggatattggcctgaaattttctttctttattgtgtctctgctagattttggtatcaggatgatgctggcctcataaaatgagttagggaggattccctctttttctatggtttggaataatttcagaaggaatggtacaagctcctctttgtacctctggtagaattcggctgtgaatccatctggtcctgggcttttttggttggtaggctgttaattactgcctcaatttcagaacttgtaattggtctattcaggtatttgactacttccttgtttagtctggggagggtatatgtgtccaagaatttattcatttcttctagattttttagtttatttgcatagaggcatttatcgtattgtttgatggcagattgtatttctgtgggatcagtgatgatctcccctttatcaccttttattgtgtctgtttgatttttcactcttttcttctttattagtctagttagcggtctattttgttaatcttgtaaaaaagtcagcttctggattcattgatttttttgaagggtttttcatgtctctatctccttcagttctgctccgatcttagttatttcttgtcttctgccagcttttgaatttgtttgctcttgcttctctagttcttataattgtgatgttagggtgttgattttagatctttcctgctttctcctgtgggcatttagtgctatgaatttccctctaaacactgctttagttgtgtcccagagattttgatacagtgtgtcttttttctcattggtttcaaagaacttatttatttctgccttaatttcgttatttatccagtagtcattcaggagcaggttgtccagttttcatgtagttgtgcagttttgagtgagtttcttaatcctgagttctaattaaattgcactgtggtctgagggactgtttgttacgatttccattcttttgcaattgctgaggagtgtttcacttccaattatgtggttgattttagaataagtgctatgtggtgctgagaagattgtatattccgttgatttggggtggagagttctgtagatgtctattagatctgcttggcccagagctgagttcaagtcctgaatatctttgttaattttctcccttgatctgtctaatattgacagtggggtgttaaagtctcccactattattgtgtgggagtctaagtctctttgccggtccctaagaacttgctttatgaatctggatgttcccgtattgggtgcatatatatttaggatagttagctcttctcattgcattaattcctttaccattatgtaatgcccttctttgtctttttgatctcggttagtttaaagtctgttttattagagactgagatcgcaacccctgctttttttgttttgttttgtttttcatttgcttggtaaatcttcttccatccctttattttgaacctatgtgtgcctttgcacatgagatgggtctcctgaatacaggacactgattactctatttaatttgtcagtctgtgccttttaataggggcatttagcccatttacatttaaggttaatattgttatgtgtgaattttattctgtcattatgatgctagctgtttattttgccccattagttgatgcagtttcctcatagtgtcgatggtatttacattttggtttgtttttgcagtggctggcaccggtttttcctttccatatttagtgcttccttcaggagctcttctaaggcaggcctggtggtgacaaaatctctcagcatttgcttgtctgtaaagaattttatttctgcttcgcttatgaagcttagtttggctgcatatgaaattctgggttgaaaattcttttctttaagaaggtcagatattggcacccactctcttctggcttgtgggatttctgcagagaaacccactgttagtctgatgggcttccctttgtgggtaacctgacctttttctctgactgccctgaacattcttccttcatttcaaccttggtggatctgatgattatgtgtcttggggtttctcttttcgaggagtatctttgtggtgttttctgtatttcctcaatttgaatgttggcctgtcttgctaggttgggaaagttctcctggataatatcccgaagtgtgttttccaacttggttccattctgcctgtcactttcaaggacaccaataaaatgtaggtttggtctttccacatagtcccatatttcttggaggttttgttcattcctttttattcttttttctctaatcttgtcttcacgctttatttcattagtcaatcttcaatctctgatatcctttctttcacttgatcgattcggctagtgatacttgtgtatggttcatgatgttctcgtgctgtgtttttcagctccatcaggtcatcttggttcttctctaaactggttgttctagttatcaattcctctaactttttatcaggttcttagcttccttccattgggtaggaacatgcttctttagcttggaggagttcgttattacccaccttctaaagcctacttctgtcagttcatcaaactcattctccatcctattttgtcccctcactagcaaggagttgtgatcctttggaggagaagaggcattctggttttggatttttcagactttttgtgctggtttttcctcatcttcgtggatttatctacctttggtctttcctgttggtgacctttggttggagttttgagtggtcatcctttctgttgatgttgatgctattgctttctgtttgttagtttttcttttaataatcagggccctcttctgcaggtctgttggagtttgctggaggtccactccagaccctgtttgcctgcgtatcaccagcagaggctgccgaacagcaaagattgctgcctgctccttcctctggaagctttatcccaaaggggcacccaccagatgccagccggtgctctcctatatgaggtgtctgtcgacccctgctgggagatttctcccagtcaggaggcatgggggtcagggacccgcttgaggacacagtctgtcccttagccgagcttgagcaccgtgctgggagatcctgctgggagccagcaggcaggaacgtttaagtctgctgaagcttcacccacagctgccccttcccccaggtgctctgccccagggagatgggagttttatctataagcccctgattggggctgctgcctttctttcagagatgccctgcctagagaggaggaatctagaaaggcagtctggctacagcggctttcccaagctgccatgggctctgcccagttcgaacttccctgaggctttgtatccacggtgaggggaaaaccgcctactcaagcctcagtaatggcagacacccatccctccactaaactctagtgtcccaggttgacttcagactgctatgctggcagtgagaatttcaagccagtgaatcttagcttgctgggctccgtggggttgggatttgttgagctagacttggctccctggtgtcagccccctttctagggaagtgaatggttctgtcttgctggtgttccaggctcgactggggaatgaaaaaagcctcctgcagctagcttggtgtttgcccaaaggccgcccagttttgtgcttgaaacccagggccctcgtggtgtaggcacccgagggaatctcctgatctgtggattgcgaagtctgcgggaaaagcatagtatctgggctggatagcaccattcctcctggcacggtccctcaaggcttcttttggctaggggagggtgttccccaaccccttgtgcttctcgtgtgagaggacaccccaccctgcttctgctcacccaccatgggctacacctaccgtctaaccagtcccagtgaaatgaacctggtacctcagttggaaatgcagaaatcaccggccttctgtgtcggtctcactgggagctgcagaccggagctgttcctgtttggccatcttgcccaggagcccccagtggtacttttttcaatgcttaaaagaatggaaacaatctatttagaaagtgaacatgtattatagatttcagcatgtccattagaagatggtttactagaactatttctttttgcatatagaggaacaaacttgaacagaaaactctcagtctttgtactgaatttccttgtcttgaaagaaatgaggaggtagtgaccagcatttttattagaatgtcagaggtgcctctcataaactacttgaacgctgacttcaagagttgcaatgatcaaaaaaaaatgcagaaaatgaactagtagataactgtgggagatggaaggtgttgatggcattcaccacaggtatgcacttgtccacttattttcttggctggattaatgaaaggatgaggaacctgtttttattttttatttttttaaggcagaaagatcttcgcaactatcaatatggtgaaatgaaaaacaactacccattttcttgtcctcttttatccttgattgtagttatgtaaaaagctttactcgttaaaaaaaattaaatgtttggccaagtcatgggatcaactcaggattttattataacccagatcttggctaaccacattttcttaaaatgtccagtagactgaattgcacccgtggcttctaacatgaacggctggagccaagaatgcttgcgtgaaagcagccagccaccaaaacacaatgggatttattccttcattctgggtttaaagaaaggatcttaaagatccaaccttttagcctagaaagctttgtaaaccttttcaaatacctctgaggaatctgcatactttgtagctcaacttattagtctatttcattcacacgaggagattctccactctaaacactctgacttgcagaggatggaataccaagtaggtgtactctggattggggctttgataaaaacctttcaaagaagaaccatagtacaacagtttttgggatacagtttctggaataatgtaaaatggtgaaatgtaggcagatttttgtaaccctgctagtaagctaattaagagtatgtatttctgtattggttgaagaagttttattttttcctttaagaaatttctatgaaatgcaagctattataatgagaaagaattgttcctttgccaattttaaagcctttggagacattagtgtattaaccccacatggtatctgaagggagcattgaactggcagccagaattcctgagttctggccttgaaactggtatgtgctactgatattatcttgagcatattcattcatctgtcctggaagagatcatgaatgctaatcaaatattccatgtgttcatcaatatttgcaagcatcccctgtggctatgttggggtcatgtgacaagtgcaggacataagtccaagggatgtttgtcttccagtttgaaggagttaagtgaaccaggataaattttcaataatctttgtcatctgcaaagcagcaaacaaaggttttaaaatggccaagttgcaagatgggagcaaggagatctctgagttgtaaaaagaagaggaaagccatttgttcattgcgacatgaaaaggaaataaatatttgctgtatcaagctacgtgaatctgggggttgttttgtgccacagcatagcaaatcctatgttgactagcgtctctccaggagtcatcataagctgaggggtttggagacttcttaattctgttccagtttgtattcctgaaattgtctttgggcatatgaccttcattttacaaaagaaagaacagagaagtttggagataactgactaaagtcacaaagtaagtttgtggccatgctgcacgatgtatttctctgggaccctgtagattcatattccccaggtatatttctccacaacctatgagattaactgtgggatcattcaaattgaccattaacaaaatgctagattgattctcttcctgtctactaggttttgttcacttagacatgatgtaattctgtgatgcaatggataatacggcattcaacatcctgaccttaataccagagacttatctatcagattatggagtctgatagtatacatattatgtctattttcaactggggaaaaattctacctctgtgtttagttttgaggtggttattgaacaagaacctatgatagaccccaaagctattttcacaaaacttgaatttagaaatttaatgcaggggtccccaaccctcgggccatggactggtaccagtccttggtctgttaggaactggccacatagcaggaggtgagtggcaagcaagcaaaggaaggttcatctgtatttacagctgctccttatcactggcaataccacctgagctctgcctcctgtcagatcagaggcagcattagatcctcataggagcgtgaaccctattgtgaactgcacgtatgagggatctaggttgcacactccttatgagaatctaatgcctgatgattgtcactgtctcccatcacctctggatgggaccatctagttgtagaaaaataagctcagggctcccactgattctgcatgaaggtgagttgtattattctttctttatatattacaatgtaataataataaagttcacaataaatgtaatgctcttgaatcatcccgaaaccatcaccttagtcccagtccatggaaaagttgtcttccaggaaattgatcccaggtgccaataaggttggggactgctgaattaatgcatttgtaactacctggtagtttcttgtctttggcatccgggatggatataattgtcctcccaattgtcaagtgtcaaaatgtaaaatatagtacacataaacaaatattgatgaggataaaatgagttaatatctgtaaagtccctaggacagagcctggcatagaattaacaatatacaggtgtttattaagtaacacaaaggtgattatgatggatcatgagacactgtgagctaggatctagttgacatctcctttaattttcctcttatagaaccccagatacatgtcatccgatttctatttaaccatatttttgtgctaggaaatatgattttgtagtacatggtaaaatatttttacttaggacccatcattatctcaattaaaaataagaaaacaggctaagaggagttaagaggtttacccaagtttacaaagctgtcaatgtccttcactatctgcctaggaagttcataatctttcctaggcagtcttctatatcactgtctccattattagtaggagtagcagtgccatgtgatttgagcatggcagcccacaagttccactattaactttctgcagggtaggaatcacttcagccaagatctggagctcaagcaatttccctctgggtgagcagcatttattattcaaatacacttatttaataaacttaattattacatattcaactatttaataatctgtgctagcattttatcatggtttcacatttgttttttctctgacctttttgaagcttttttcctagcagctaaggtgtgtcacaccaaccatcttaaagacaaggccaggcacatggtgaatatttgttgattgtacagttgctaaaaggagacaagttcaaatgagtcacttatagaagcatttggacttcaacagatcgtcaagtgtttgaaaactcttatcactaccatgtcttgtttctgggacattttggttttctgcattaggaaaacatcagatacctcagtttgaacactgtggagcttgcaatttactcacactattatgtcacttatgttcttgtgatcatttactggaaattatgtcattctacttctctctgcttcataggggaatcttaattccaatccatccttctacattacttctaataaatctaatttttgctttgtttttgttaaggagtatcctgccaccattgtactctagacataatctcattcatagcatcagagatactctgcagattgtgtatttgccttattttaaaaattgaagttttttaaaagactctatttaaagactctaaagactattgtatgcattgctattgttaacaactgaaaccatatcattcttgccattattttaagataagacaaatcatttgttccctgggatggaaatgagctccttttcttgtaggtttgtgtatttttccaacccatatatgattataagtttcttccagtaaccttcaaaattctttatctccttagggttaatatagtgaaataattacttgggaaaatgggaggcatagctttgcttttgaagtctagctttactacttggtacccacgtaatactgaacaacatatttaatctccctgatcctcattttccttttgggtaaaaggagaataatgtgcatatagaatagggattaaaggcatggactctcaagctattttgcctagtttgaagcttcactgtgccctattttgcctatgatatcattggcaattacttaactcttcgtggtgcagttttcacggtaaaaaattagggaagcaattggatcttcttcgtatggtgatagaaatatttttatatgtgctttttctttcagattgtaatggaggttcgaaataaagcttgctcaagtccctcctatcaagtggcatagtatttgtatataacctatgcacatcctcccatataccataaatcatctctggattacttataataactgatacaatgtaaatactgtgtaaatacagtcaggtgctacataaaaacttttcactcaataatgctccacatatatgatggtggtcccataagataataatatagctaaaaaatttctattctctagtgaccttgtagccatatgcattattcacatgttggtggtgatgctggtataaacaaacctacacatacgattacacacggtacataatacttagtaatgatagtaaacgactacgttaccggtttatgtgtttagagtactaaacattttatggttattttgagtgtactctttttacttaaaaaaaaaaagttaattgtaaaacagcctcaggcaggtccatcaggaggtattccagaagaaggcattgttaccataggggatgacagtttcattggtgttattgtccctgaaaaccttccagtgagaaaagatgtggagctggaagagagtgacattgatggtcctgaccttgtgcagggctagtctaatgcatttgttgatgtcttagtttttaagaaaaacatttaaaacataaaaaattaaaatcataaaacaagtaaacgaagaaggaaaatattttttgtgtggctgtaaaatgtgtttgtgctttaagctaagtgttgattcaagagtaaaaaagcttaaaaattaaaaagtttgtaacataaaaaagttacagtaaactaagtttaatttattattgaagaaaaacatgaatttagtgtagcctaggttcacagtgtttacaaagtctacagtacatacagaaatgtcctaggccttcacattcactcaccgctcactcactgacgcacacagagtaacttctaggcttgcatgctccattcatggtaaatgcctgtattaggctgttcttgcattgctataaggaaatatctgagactgagtaacttataaagaaaagaggtttaaatggctccaattctgcaggcttcacaggaatcatggtgctcgcatctgctcacctttgggtgaaacctcagggagctttcaagcatggtgaaaggtgaagggagaataggcatgtcacttggcagaagcaggagcaagagacagcaagagggagagagagacgcagacagagagacaaagagacagagtgagtgagaggaggtgcacatacttttaaacaaccagatatcacaagaactcactcactatggcaaagacagcaccaagccatgagggacctgcccccatgacccaaactcttcccaccaggcctcacttccagcactggggattacaaggcaacatgagatttagatggggacaaatatccaaactgtatcagtgctctagagaggtgtaccgtttttatcttttatgccttatttttagtgttccttttctatgtttagatacacaaatccttaccatgtgttgtaattgcttatcgtattcagtacagtaacatactgcacaggtgtgtggcctatgagtaacaggctattccatatggcctagatatgtagtggctactatctaagcttgtgttaatacactctatgataatttcactgacagaatcacctgagcacacatttcttagaacgtatctttgtctttaagctgtgcatgattgtagttgttgtactgcattgtttttaaaatttgtatcatttttacagctatattgttattttttatggcttcatttttttccaagtgtttttgatccagagttggttgaatttgtggatacataaccttctgataaggagggctgacggtatgtcttagtgctttgattatacttcagaggtctgtaaactttctataacaggtcagatagtaaatttttaagacttttgggacacctatacaagtctgccattgtatagcaaaagtcattatagataatgtataaacaaattggcgtgattttggtcaataaaactgtattcacaaaaacagccttaggctggctttggcccatcagtcatactttgctgacccctgatctgactgttggttaacacaaatttgatcccatcaggcaattttgccttttcttccccagattacagatactccgtctctgtagctctgaatttgtactttatttctcttgctcatctaaaagcattcaattttcaattgtttaactaacaagctttttgagctgcgtgccagagcagagatcaattttagtgttaattcgtagtcgttaaatagaattaggaataaatttttagaatcaaatatactcagaatagaggaaattttctactttcatctatctctcttgatggactaaggtgagaatatacatcctcaacttctccccataggtccctaatagatacccaaacttgcagtatacaaaatcaaactccttattttcaccctctaatccattccccctgcaatcttcttcttccttgcagttcttcagttcaaaatttttaggtcatccttgaccgtttgctctttgacattccacatggaattcaacagaaactttctctgggactgtcttcagcatatacccagctctggctactttgcacaaccattgacaccaccactgagtgatggggaagaaacaaaatatttccacaagtaacctttttactcagtaactcaggatgtttttcaatttgagagacgatgaagtataaggctaaaatttaaaccatatcaagatcatttattattaagattattctatatatagtatgtttattgtccttttgagtaagttttgttttgtattttccaattgggttgtgttgtctcatgaaatggctatttactttgctgtgtcatgtatttaggccattttactcaacattgaaaataattttcttagtgtctttggcatttttggagcataagtctttcttcaagatgaaattttcttttcccctccaatataggcatttcttgttttattacactttgctctattgcttagcagatattgtggattatttttttcaaattgaaagtttgtggtgaccttctgtcaagcaagtgtagtgtcattacttgtcttcttttttaaatgtatcttttaagttcaggagtacatgtgcaagtttgctaagtcaacttgcgtcatgggggtttgttgtgcagattatttcatcacccaggaattaagcctagtatccatttattatttttgccgatccactccctccttccagcctacaccctccaaaggacccaatgtgtgttgttcccctctatgtgtccatgtgttctcaccatttagctcccacttataagtgagaacatgtggtatttggtattctgttcctgtgttatttgctaaggagaatggcctccagctctatccatgttcctgtggaggacatggtctcattctgttttatggtgtaaatgaactacattttctttatccagtctaccattgatgggcatttaggtcgattccacgtctttgctattgtgaatagtgctgcagtgaacatacatgttcacgtgtctttataagagaatgacttatattcctttgggtatatacccagtaacgggattgcggggttgaataatatttctgtttttaagtcttaaaggaatcatcacactgtcttccatctggctgaactaatttacactttaatcaatagtagttttgatttgcatttcttttttttttttttctttgagatggagtcttgctctgtcgccaggctggagtgcagtggcacgatatccgctcactgcaatctctgcctcccaggttcaaatgattctcctacctcagcttcccgagtagctgggattacaggtgcacaccaccacacccagctaatttttgtatttttagtagagacggggcttcactatgttggacaggatggtctcgatctcctgagctcatgatccacccacctctgcctcccaaagttgagtttttttcatgattgctgactgcatgttatattgtcctttgagaattgtctgttcatgtgctttgcccactttttactgagatttcttgttttgttttcttgtaaatttgtttaagttccttatagatgctgggtgttaaaaactatgttttgtcagatgcatagtttgtgaaattttctcccattctgtaggttttctgttcaccctgttgatagtttcctttgctgtgcagaagctctttagattaattaggcatcatctatcaatttttgcttttgttgcaattattttggcatgttcatcatgaaatctttgcacattcctatgtccagtaaggtattgcctaggttggcttccaggatttttatagttttgggtttaacatttaagtctttaatccatcttcaattaatttttgcatatgatttaaggacaggatcctgtttcagtcttctgcatattgctagccagttactccaacatcatttattgaataggaaattttttcccaatggcttttttttgtcagggttgttgaagatgagatagttgtaggtttgtggccttatttctgtgccctctattctgtcacattggtctaaatgtgtgtttttatactgtaccatgatgctttggttaccatagccctgtagtatagtttgaagtcagataacgttatgcttctagctttattctttttgcttaggattgctctggctatttgagctcttttttggttccatataaatgttaaaagagtttttttctggttcttttaagaacatcaatggtagtttaatagaaataggattgtatctataaattgctttgggcagtatggccatttaaacaatactgattcttcctgtccgtgagcatggaaggttatttcatttgtttgtgtcatctctgatttctttcaacagtgttttgtagttctcatagagatccttcacttccctgtttagctgtattcctagatattttattctttttgtggcagatgtgaatgggattatgtttctgatttggctctctgcttgactgttgttggtgtatagaaatgttaatgctttttgcacattgattttgtatcctgagactttgctaaagttgtttatcagcttaaggagtatttgtgctgagactagggggctttttagatgtaggagtatgtcatctgaaaacagggatagtttgatttcctctcttcctatttagatgcacttatttctttgttctgcgtgattaccctggctggacttctaatattatgttggataggaatgatgagagaggacatccttgccttgtgccagttttcaaggggaatgcttccagcttttgcctattcagtatgatgtttactatgggtttgtcatagatgtttcttattattttgaagtatattactttaatacgtagtttattgagagtttttaacacgaaggggtgttaaattttatcgaaagccttttctgcatctattgggataatcatgtggtttctgtctttagttctatttatgtgatgaatcatatatattgatctatttatgttgaaaaaccttgcatcctaaggataaagcttactggatcatggaggatgagctttttgatgtgctgctatatttggtttgccggtattttatagaggatttttgcattgatgttcatcaaggttattggcctgaagttcatcaaggttattagcctgaagttttcttttttgtttccgtctgtcaggttttggtatcaggatggtgctggcctcatagaatgagttagggaggagttcctcctcctcatttttttggaatagtttcagcaggaatggtaccagctcttctttgtacatctagtagaattcagctgtgaatctgtctggttctgagcttcttttggttggtaggttatttattactgattcaatttcagagctcattatcggtctgttcagagattcagtttcttgctggttcagtgttgggaggatgtatgcatccaggagtttatctgtttcttctaggttttctagtttatttccatagaggtgttcataatgttctctgatggttgtttgtatttctgtgaggtcagtgataatatccccttgttgtttctgattgtgtttatttgaatcttctctcttttctttattagtctagttagcagtctattttattgatttttttaagcccctggattaattgatctttcaaatggtttttcaggtgtctatgtccttcagttcagctctgattttggttatttcttgtcttctgccagctttggggtttgtttgctcttgttcctctagttgttttatttgtgatattaggttgttaaagtctttcttactttttgatgtgggcatttagtgctataaaattccctcttaacactgccttagctgtgtcccagagattctgatatgttctatctttgttctcaatggtttcaaaaatttcttgatttatgccttaatttcattatttaccccaaagtcattcagaagcaggctattcaatttccatgtaattgtatggttttgagtgaatttcttagtcttgttttctaatttgattgcactgtggttcaagagattgttataatttcagttcttttgtattatttaaggagtattttctttccaattatgtgatcattagaggatgtgccatgtggcaaggagaagaatgtatattttgttgttttagatggagagttctgtagatgtttatcaggtccatctcatccagtgctgaagtcaggtctgaatatctttgtgaattttcagtcttggtgatctgtctaatatcgtcagtggggtgttaaagtctcccactattattgtgtgggagtctaattctctttgaaggtgtctaagaacttgctttatcaatctgggtgctgctgtgttgggtgcatgatgttccctcagtctttgaaattgctgacctttggattattttctttttcttttattatattttatgaccttgagggtttgattgtggtgtagggtggattctgccaacttgcttcatttccggaagatcctagggggccagtggtcagctcccaaccactggactgtatgctatctttgggggacttgtattgggccctgactttgttctccggctccttgaggttaggaatccactgcgcgggaggggctgaggggtcccaagatcagtggtcactacacttcaatgagtggtgtcagccaaagcatttcaaagtgtggggacagcgggattcatcctcctttgcgaatgcccacagcagcagtagcaacagctgtggcagagtactagcgggtattgtggtgcctgcctccctgtggatgtttaccacggtggcaaaggcagtgcagctggggagggggtggggcccctgctggtgactgtgtgcagggtcctgctggaggtggtattggctcggggacagggtgcctgcaggcacaggtctaggtgccttttctgtgccccgcaagcaggagcgatccctcagggcaggggagaattctgctgttctttgttcagtgttagtgcaaggtcagggagctggcaggggcagggatggctggctctgtgcctgcaaatgttccatctgcaatggtggtccgtcgggggaggtggggtggtctgtactcccatgtgctggcagggcaaggaaagcaaaatctgctctcacagatgtgagccagcaaagtaatgtgaggagttgccttgggcctgggagaatctacagtatgtgggtgggagagtttgtgggctggtgtgtgtctgtaggggccaccccattggaactctccaccagtcagacatggcccaccagcacagaagctatgctgtgagtccccagggcaatcgagactgctctgccaggaggcatggccaggctggggccctgaaagagggcagcaagccaaggggtgctcaagtcgtacttgttatgtctgatgttcaaggctgccttgcagagttcaggtctgacagttcctctagggctaaagtctcctaaaggagcaagtcaagtctagggggtgactgtccttggctgtgctatgttatagatgctctcgcatcaaactctctgggttccacatcagctgtcttgttgcccctaccacttctctaagcagctctccctgccaactcaaatgcccttgatggtcgagggatttcctcctgctggagtcccagagccctgcggtgagggtgggttgctccttgccagttcaactcatccatttccctggagccattgtgagccaagaatgagtcctgctgcatgggagctccgtgccaaggttcccagttttcttccccttcagcttagcttctgtgtcttccctccactcttggtgccttcgctctgcagatctgttaggaacagatctgtctccgtccctaggtgggagctgtttcacctggctgcgtctagtcagccatcctaccctccctcctttcttggcattatttttctaacaacatgtgcttactttgtgtctctgtgccacattgtggtgatttcctcaatatttcaaacctttttattgttattatatctgctatggtggtctttgataagtgatctttgatattactattggaattgttttggggcaccatgaacctcctgcatgtaagagggcaaacttaattgataaatgttctgattgcttcatagcctagtcgttcccttatctctttccctttctttgctcttctctattccctgagacacaacaatattgaaattagggcaattgataaccctataatcacttccaggtgtttgagtgaaaggaagagtcacacatctctcacttaaagagctagattaagctagattaatcttaacaaggaaggcatgtcaaaagccatgacagactgaaagctaggtctcttgcaccaaacagtgtgccaagttgtgagtgcaaaggaaaagttcttaaaggaagttaaaagtgatactccagtgaccccagtaatgataaagtgaaacagatttattgctgatatggaagaactttagtagtctggatagatcaaagcaggcacaacattcccttaaaccaaagtctaatccagagcaaggccccaactcttcaactttttgaagaacgagagaaatgagaaatcttcagaaaaaaagttgaaagctggcagacagtgattcctgaggtttaaggaaagaaaccacctttataagataaaagtgcaaggtgaagcagcaagtgctaatagagaagctgcagtaacttatccaaaagatctagctaagagcattgacgaaggtggctacattaaacaacagattttgaatgtagatgaaacagtcttctattggaagaagatgacatctaggatgtttatatctagagaggagaagtcaatacccagcttcaaagtttcaaaggacaggctgaccctcttggtaaggactaatgcagttggtaactttaagttgaagccaatgctcattgaccattctgaaaagtcttagtgacattaagaattatgttaaatccactctgcctgtgctctataaatgaaacaacaaaacctggatgacagcgcatctgtttacagcatggtttactgaatgttaagcccactgttgagacccactgctcatgcacagagaaaagattccatttaaaatatttctactcattgacaatacacctggtcacccaagagctctgatggagatgtatgaggaaattaatggtattttcatggctgctaacacaacatccgttctgtagcccatggatcaaagagtaatttcaactttcaaattttgttacataagaaatatattttacaatgctatagttggcatatatcatgattcctctgatgaatctgggcaaagtaaattgaaaaccttctggaaaggattcactcttctagatgtcactaaaaacattcataattcatggtaggaagtcaaaatatcaacatagcaggagtttgggagaagttgattccaatcctcatggatgacttgaaggggttcaaaactttggtggaggaaataactgcagatatggtagaaatagcaagaaaactggaattagaagtggaacatgaagctgtggcagaattgcacaatttcatgataaatttgaatgaataaggtgttgcttcttgtggatgcaaagaaagtcatttttgagatgaaatctactcctggtaaagatgctgttaacattactgaaatgacatcaaaagatttaaaatatgacataaacttagttgataaagcagcagcagagtttaagaggattgattctcattttggaagaagttttactgtgggtataatgttatcaaacaacattgaatgttacagagaaatctgtcatgaagagaagagtcaatctaagtggcaaacttcacggtcttattttaggaatttgccacagacacctcaacctttggcaaccaccagcctgttcagtgagcagccatcgacgttgaggccccctgaggaggtcccaggctgtggcaggggttcaggctggtggaaaagtgggagagaagagtcaggggacaattgggaagtgtgatgatatggggaaagagggatggagtggaagccagaacccattgcttccagtatcaatctttttcactagcaaaaaggttataacttgttaaagcctcatgtgattgttagaatatgttagcaataaaatatttttaattaaggcatgagcatttttttaagatataatgctattgcacacttaatagactacagcatactgtaaacataacttttttgtgcactgggaaaccaaaacattcatggaacttgctttattgtgatatttgctttattgcaatcgtctgataccaaattgacaatatctctgaggtatgcctgtattttatctttatttgtgataagttcttacacatttgataaaacaagttatttatattgaaatgcatttgatcgtatctcttatttaagaagaaaatttggaattttccgtgaaaaagcctgctgaagtaatcaccctctgcaatttataaatattagaaacattggtcaagttttagaatattttattgcctattaaatgttatgtgactgtgttaaattattatatattatttgcatagtgtgaaagcttacttttgcttcacgaattattttaaatggaaaaaattctcagttatacttggaagagaaaaatcacatgtccattttggagtgcattttaaattgtgctacaaagaatgacaaaacactgcagtaaatgtgacgtttgaaattttataaggagtatgatataaataccactttttaatagtatttataaaagtggagccatgatacattctggctataacaaccataacaatattccatatttttaataatatgaatgtttttaaaaatatttttccatagttcttagaacaactttagaattcctcaagtacttgtttacatttaggtgttctggtatttcctgtttacatttaccctttgcgaaaggacaaaatcaagactatgatacccttttctcagcacacctgtctcgtgttggatctgtcttcccctggaaatgcttcttttttttttttttttttttttttttttttttttttttgagacggagtctcgctctgtcgcccaggctggagtgcagtggcgcaatctcggctcactgcaagctccgcctcccgggttcacgccattctcctgcctcagcctcccaagtagctgggactacaggcgcccgccactacgcccggctaattttttgtatttttagtagagacggggtttcaccgttttagccgggatggtctcgatctcctgacctcgtgatccgcccgcctcggcctcccaaagtgctgggattacaggcgtgagccaccgcgcccggccgaaatgcttcttatttgttagtgtggcagcgatgataacagcacccccagacaccctggtaaatcgcttctctcgagcgctttgttgtggtcttcgttgagttctgagtgaggtgtgaaatctgagaagacagaatttgttttcattcttcagtaagtaagttagcatgtggttgtgcctagcagagtatctggcacttagcgggccagttaaataaacctggatttaaaaccagacttcacaaaatttgctgggaatctttttttttttttatactttaagttttagggtacatgtgcacaatgtgcaggttagttacatatgtatacatgtgccatgctggtgtgctgcacccattaactagtcatttagcattaggtatatctcccaatgctatccctcccccgtcccctcaccccacaacagtccccagagtgtgatgttccccttcctgtgtccatgtgttctcattgttcaattcccatctatgagtgagaacatgcagtgtttggttttttgtccttgtgatagtttactgagaatgatgatttccaatttcatccatgtccctacaaaggacatgaacttctcattttttatggctgcatagtattccatggtgtatatgtgccacattttcttaatccagtctatcattgttggacatttgggttggttccaagtctttgctattgtgaataatgccgcaataaacatatgtgtgcatgtgtctttatagcagcatgatttatagtcctttgggtatatacccagtaatgggatggctgggtcaaatggtatttctagttctagatccctgaggaatcgccacactgacttccacaagggttgaactagtttacagacccaccaacagtgtaaaagtgttcctatttctccacatcctgtccagcacctgttgtttcctgactttttaatgattgccattctaactggtgtgagatggtatctcattgtggttttgattttcatttctctgatggccagtgatgatgagcattttttcatgtgtgttttggctgcataaatgtcttcttttgagaagtctctgttcatatcctttgcccactttttgatggggttgtttgttttcttcttgtaaattttgtttgagttcattgtagattctggatattagccctttgtcagatgagtgggttgcgaaaatattctcccattttgtaggttgcctgttcactctgatggtagtttcttttgctgtgcagaagctcttgagtttaattagatcccatttgtcaattttggcttttgttgccattgcttttggtgttttagacatgaagtccttgcccatgcctatgtcctgaatggtaatgcctaggttttcttctagggtttttatggttttaggtctaacgtttaagtctttaatccatcttgaattgatttttgtataaggtgtcaggaagggatccagtttcagctttctacatatggctagccagttttcccagcaccatttattaaatagggaatcctttctccattgcttgtttttctcaggtttgtcaaagatcagatagttgtatatatgcggcattatttctgagggctctgttctgttccattgatctatatctctgttttggtaccagtaccatgctgttttggttactgtagccttgtagtatagtttgaagtcaggtagtgtgatgcctccagctttgttcttttggctcaggattgacttggcaatgcgggctcttttttggttccatatgaacttgaaagtagttttttccaattctgtgaagaaagtcattggtagcttgatggggatggcattgaatctataaattaccttgggcagtatggccattttcacgatattgattcttcctacccatgagcatggaatgttcttccatttgtttgtatcctcttttatttcattgagcagtggtttgtagttctccttgaagaggtccttcatgtcccttgtaagttggatttctaggtattttattctctttgaagcaattgtgaatgggagttcactcatgatttggctctctgtttgtctgttgttggtatataagaatgcttgtgatttttgtacattgattttgtatcctgagactttgctgaagttgcttatcagcttaaggagattttgggctgagacagtggggttttctagatatacaatcatgtcatctgcaaacagggacaatttgacttcctcttttcctaattgaataccctttatttccttctgcctaattgccctggccagaacttccaacactatgttgaataggagtggtgagagagggcatccctgtcttgtgccagttttcaaagggaatgcttccagtttttgcccattcagtatgatattggctgtgggtttgtcatagatagctcttattattttgagatacgtcccatcgatacctaatttattgagagtttttagcatgaagggttgttgaactttgtcaaaggccttttctgcatctattgagataatcatgtggtttttgtctttggctctgtttatacgctggattacatttattgatttgcatatattgaaccagccttgcatcccagggatgaagcccacttgatcatggtgaataagctttttgatgtgctgctgcattcggtttgccagtattttattgaggatttttgcatcaatgttcatcaaggatattggtctaaaattctcttttttggttgtgtctctgcctggctttggtatcaggatgatgctggcctcataaaatgagttagggaggatttcctctttttctattgattggaatagtttcagaaggaatggtaccagttcctccttgtacctctggtagaattcggctgtgaatctatctggtcctggactctttttagttggtaagctattgattattgccacaatttcagatcccgttattggtctattcagagattcaacttcttcctggtttagtcttgggagagtgtatgtgtcgtggaatttatccatttcttctagattttctagtttatttgcatagaggtgtttgtagtattctctgatggtagtttgtatttctgtgggatcggtggtgatatcccctttatcattttttattacatctatttgattcttctctctttttttctttattagtcttgctagcagtctatgaattttgttgatcttatgctctcagttttcttgtgcataaaatgggaataataactgccttctggaattgtagcgggaaataaatacaattgtagctctcgggtgctaagcacagggctgggacctagtaaatgctcagtaactgctcattactcttttttcttattttgcttccttttttttttcttcactgttgtctttttattttctattttaaggatattggcttagtaaaagaaactaaaatacatctgcatataaattaaataaatgcctcatttttaaacattctgtgagtgtctatgtatagctggtaccttaattgtagttgttcaataaatgatttatcttactttgggaactttcttaaaaagcttaaatccctcaatgttaataatagtgaaaatcttatgtttgaaaaaatgcttttgaaaaacatatattgggttacccttttaaagaaatatacttaatattgatatgagtaattttttaaaagtaatcaaagctttagagagtaagagaagaaataaaaaaaaacaaaaacattatgacagtgtttatatccctacttattaaattcaacatggaaaacaaggaagtagaaagtactttgtaaaatacctaaaatgcctgaatataagaagtatttggatattatagataacattttctatactacaatgtcacctcaaatagtgtacacacacagttatgaggatatgatagtcacttagaggattcatgctgggattgaatagtaggaccacacattttaggaaattttaagcagaaatgctttagaagaaatagtctttatttatttatttttttaaaagagcttttaaattactgagttcaaatacagaagaaggcctaagtttgaattcatggcgtattgctataatgcactattagactaatccttcattttcttgtcaattaaagacttacctttattcactgattcacttatcagtaattcgctcggtattttaaagctggctgttaaaaatccctttgtttatggcaataaggcaccattcattttgtgaactttataaaaccaacctctgccaattttgctctttgagaatagctctaaagatgtgttcccacagtaattactgattccagagatgttcattaaagaatgaagtcagaggcaagtgtttgaaacaattgtatcccaccaaagccagctttactgcgcaccttcccagaatctacagtttctccacgtttaagaaaatcactgaacaacttcatacaaaatttgtacttttgagtgcttttacctgcagtagcattaaagatgagtattattttttacatatttgtattgaaatcagatgcagggaaagatggagggaaagctaggatgctttgaatgtgggcccagttgtccgtcatatagcttctgtgaatagtatgggtcaatcttgtgttcctgctctatgttgcccacttacccagagtgaccagggtgagaaaagaaaaggaggggagaaacttcagtgaagccagccaaatcttagcagagaaaaataaataaataaataataaataaataaataaataaataaaatggttgtggagttgaatatttcttttaaaatggatttgttattgcagaagagtaggaagaaaagtttaattcttttattagcttattatcagaacctgaaatgctggagtgtgttttaggtactgcatagctatcctgcagttacagcccaacctcccactgagccataatgggcaaaggaagagagaaaattcacagtgagagagcagggagagagagattttgctatcagcctgtcagtgacagatctgaatgataaacgccttacagaaatgaagttacatttatttttattgcatgaaaatatataacagacaaaggaaggaagtcagaaaacgggattaggtatattttctaaatctttaggtgttaaacagactagagaccagtcacttgtaaatgaacacattccttgtttggatgcaaacaacccagccaaattagtttcctaagtgcttggaaacagctttctgtttttggcttccagacctgagttctttcattcatactattttttttttctttttgttcaatccttattaatcaccaatatttcaaatactttgtaaatatagattggtttcattagagttaatgtatttgggggccaacaggttgaatgaatgattttattttaaaattccaagatcctgcctgatacctggagtataatactgagcatcctgaggagaaatgttgcaatagcaggcttttgtgaaccatatcccaagaactgcagatccttgcactgtggtgactgggaacatttactcaggattcagcctgctagcatttgaacactgagagattgtggaatctctgtaggcctcagcttcttcatctgtaaaatggaaaagctaataatacctacttcaacatttttgtttattttttgacagagtctggctgtgttgcccaggctggagtgcagtggcataatctcgactcactgcaacctccacccctcaggttcaagcaattctcctgcctcagcctccctgagtagctgcgactgcaggggtgagccaccacaactagctaatttttgtctttttagtagagatggggttttatcatgttggccaggctggtctcgaacttctgacctcaagtgatctgcctgcctcggcctcccaaagtgttgggattacaggagtgagccactgcaccgggccaacatttttgttttcataaaggtagattaaatgagatttcctataaacaactgtgagatcattgcctggtgcatagtaagtgctcaataaatgttagcaattaatattacatactgatgactggagcacctttttaaaaaagttatgcttattcctaaataaaaaataattcacatacctattaccaaaaattcagaaaaatagaactatagatataaaccgtatttagaaaataagaatccagtgttatcttactacctgactgtatctatccactatcagtacagctatcagatgcctttattaacatgatcccattcaggctgggtgtggtggctcacacctgtaatgcctctctttggggtgctgaggcagagcagattgcttgagctcaggagttcaacaacagcctggccaacatagagaaacctcatctctacaaaaaaatacaaaaatgagccaggcgtggtggcatgtgcctgtagtcccagctacttgcgggcaagaggatcgcttgaacccgggaggtggaggttgcagtgagccgagatcacaccactgcaccactgcactccagcatggatgacagagcaagaccctgtctcaaaaaaataaataaatacataaataaaatgaaataaagaaaaaagaaagaaaattcctgttaaaaaacacttactgtgtttattacaagttaattatttactgccagttcatagccatctttccatcaataaatatagatgtaccaactgattgatgttagtgtcttcatcatgctccatgctccatagtggtccataatttaagtagtcacccctggcatcttaaatattttttgtaaatatagataataaaaatgccttcagtcagcacattcttgtttgctgtccctggagtgtttggatgaccattaaaaatggcagaaggctgacttggtttttaggcctgaattacagccctgccatctacaagctgtgtgactgtgagcaagttacataaccttactgtatcacaagtattttttttctcatttataaaatgatgataataagagtatctagctgacatgattgctgagcagagaaagatgttaagacacataaagctttggagactggtttctggtctatgatttttactcaggaagtattagcttgaggctatgtaaaatcttggcatttctcccaaatcatcaaaggtaaattatgttattcctttgaattagctaaattgtattgctataaaaatttacttgcaatcttaacatttcactgcaatatgtatgcatactttgggatgtttacatgtgaaaatgcacattatcctacacacttcaattctcaaaccatgttggttagagaagagattaatagttatttctagacacactatacacagaacaatttggagaaaaatcaccattggacagtagcaactagtttaatatttggcgtcttttattttctcttttaacatttccaaggaataggggacgctcttgtcaatgactttttttttttttttttgagactgtgtatcattctgtcacccaggctagagtgcaatggtgctatcttagcttactgcaacctccgcctcctgggttccagcgattctcctgcctcagcctcctgagtagctgggattacaggcatgcaccaccataccctggtaatttttgtgtttttagtagagaaggggtttcaccatgttggtctggctggtctcgaactcatgacctcataatccacctgtcttgccctcccaaagtgctgcgattacaggcatgagccacggcacctggccagtgactaaggtttattacaccacctggatagatgcagggctaggggcatgaagacaggaaggtactcccacttttcaaggacagaatgtggggcgggtggtaaaatctgaagagatcctgaaaaattgtcctcctttaggtgttgtgatgtattgcttctgcaatggccatccaatcttaaatacctaagtctagatatggcatccttattatgtaattctggaacaaaagttaccctaataaagagcttcaaacccgctaggacccactcaaaatagggtaataatactccaagacattcagaaatttcctctgttcccagtgggctagtcaggacagggcagtgagagccctcaggctagctcccctggcctcagcaactccattcacttcccccaaaagggtcctaaataaatttaaatttctctatgtacctcgacatgaaatagttggaaagcacactcttaaatgccactttactgactgtactggctaaaacaatgagctgtgtacgtatgaaaaagaatgttcatgtgttttctttgtcaattacattaatttatacccttgctagtgtttctgaaagagactaatagttccctcaaatacatttaatgacccagtttgagaaatactgttctagaaattaacactagtaataattttgtgctcatatgattacacatacaaatataaattcttgcaacttaaactccatagaaaaacttggatgtaacctggctatgtggatgaaaaactgctaatgttaatatgtcttttagcagatgatcaaaataaaaacaatacaatctaataattcccataaacatctgaaatcctctaaaaacatgtctatgtagaccataaggtaatattattctaaagcaatgattcccagaatgtgctcccagggcagtagatctgtatcatctagaaacttatggaaagctaattcttgtgacccactccagatttactgaaacagaagatgtggaggatgggacccagtcaactgtagtttaagaagctcttcaggtgattctgatgtgctccagtttgcaaaccacataatgaggctgagtccttttcagtcattccacaccaaatgagcactgtcgtatgtttaccttaggaaacataccctcaattgagtggggctgctgatatttcaattccttttaaagagtttgtctcagagccaatctgtaacaaaagagaaattcagtttcattattttatagtcaaatctcattaagtagttgctgagatgtttgtatgaaactcagatttgactttgccctgcactgtgaacaaagacgatgaaacattttcacatttggaatgattagtcatcaggagatgcagtcacaaaattttattgaaagcctaatatttattcaaaagcctttgatagactgcttttggaacttctgcgacattctccaccataatattgtttagcctctaactctccctaaattgcctttggtcagaaaagttaacgtggttactgctttgtttatttgactttcctacctcctgattcagagtagagttagctttggaaggagactaagagtcaagcgcttgcctgagtaaaacctatttttggccaagagaactcaaaaccaaaaccttatatatatccaccttattgcccagctaacttggctactaatttctctgctactatgaaattctctttcaaattcctaattcatagtcaagtctcatcttgttccagagcaattatggtggttgggaagcccaagatgagaagggtaacacaggaacaaggaagctgaatcctaacagtcaatcctgcttgttcctactatctcataccttaccagcattccatcctgaggacttaactaccaacttcaagctagcccatgtctcatcttgtggttcatcatgtctcgtcattttgtggcaaactgtccaggatgacccccattttttgcaaaaaaagaagacacagagggggaataatcttggtttttctccaaaccctagatgtagctcatatctgtgtttcctgaagttttctctctagtactcttgcagcctgaggctttttccagaatccaagggagtgggaagaaaaaatgagggaaagtcatggtccctgaagaaagagggacgctcagtaaagtccagcagacagagcaccagccagggatgtggtgggcggagccaaggacattaagctaaaagaatatgaaacttaaatctattgccatgtcccagggaaaagtggtgatgaaatttcaatgaacaaagcttactgttatttatcactttgtatgtacctttacttttttacacaaatgagatcatatcacatatttcttttgaaactgcttttttttatttaaaaatttatgacaggctgggcccggtgggtcatgcctgtaatcccagcactgtgggagccttaggtgggcgggtcatctgacgttgagagttcaagaccagcccggccagtatggtataactgcgtctctattaaaaatacagaaattagccagacatggtggtgcatgcctgtagtcccagctacttgggaggctgatgcaggagaatcccttgaacccgagaggtggaggtatcagtgagccaagatcacgggactgcactacagcctgggagacagagggagactctgtcaaacaaacaaacaaaaaaaggagacaaatattttttaggtcataaacttcttcttcttcctcctcttcttcttcttcttcttcttcttcttcttcttcttcttcttcttttcttctttcttcttcttcctcctcctctcctcctcctcctcttcctcttcctcttcttcttcttttccttattcttccttctttcctcctcctcctcctccttcttctccttcttctcctttcttagtatatctttttctaagccttcacagtataggttgagcattcgttatccaagatactagggaccagcagtgttttggattttcgattttggaatatttgcctatgcacaatgagctatcttccagatggaacccaagtataagcacaaatttcatttatgtttcatatgcaccttatatacatagcctaaggttaattttatccaatattttaaataattttgttcattaaacaaagtttgtgtcaagtacttacatgcggaattttcttttttttttcagatctttcttttttttaattttattattattttacttcaagttttagggtacatgtgcacaatatgcaggtttgttacatatgtatacatgtgccatgtcagtgtgttgcacccattaactcgtcatttagcattaggtatatctcctaatgctgtccctcccccctccctccaccccacgacaggccccggtgtgtgatgttccccttcctgtgtccatgtgttctcattgttcaattcccacccgtgagtgagaacggaattttctacctgtggcattgtgtcagtgctcaaaatttcaaattttggagcatttcagatttggaatttttagattaggaatgttcaatctgtattctcttgttgtataagatacctataaaaaccatcttctatacttattgctttcattttttttgaccagactctttttaatgttttcccatgagtacttagaataaaaccctaaaataccagcatgagcatttgcactgttttatttgttaattttaatatttatttataacaatgatactttaaaatttttcaaaaccaagactatatacaaatatatactgagatgttccctttccaccatttttatttatttatttattgagacagagtctcactctgtctcccaggcttgagtgcaatggcgcgatctctctgcctctcgggttcaagtgattctcctgcctcagcctctggagtagctgggattacaggtatgcaccaccgtgcccagctaatttttgtatttttagtagagatggggtttcacatgttggccaggctagtctcgaacttctgacctcagatgatccacccaccttggcctcccagaatgcttggattacaggtgcccagccaattcattttttttctgtaaaattaatgctactctgatggcccctaattctgactaaactcctttcagaatctaggattattaatcatcttaatttttttctgaattataataaagtagataataatctgggcatctcaaatgccatttctcatcctataattctgaaaaatattgtttagttgatgccacacaattcctggtaattctttggaaaaagttaatatgtgggacaatataattgtcaaaaataaacctgggatttttcttccatgatcttccataggtagcaaaggagaattagtacaatttaaatgtaggcatgtttctgaaatttaggttgttcacccatggatacatagtcttactaaatatcttatttcatattataacattaaagggatttataaagattgaatattatattcttacttgaaccgatattttactgcttttttcttattttaattagcatgtcagtaactgtagaatggtatcagataacctttagtcttgtttatttccaacaaaacttttctaattcttgaaagattaacataatcttgcactaatttgcattctagtacgatgcttttcaaccttgactgcacattagagtcacctggggagagttaaaaaattccaatgccaagggcaccacagaccaattaaatataaatatttgatggtaggacctaggccacagtatgttttaaagctccccaggtaactccaatgtgccgccaagcttgagaaacactgctcctgggaaagaaataattatctagtttttgttcatttttttccaattagaatttatttcagcatgctttcctggaagtatccgttttgttaaatttggcattgaaaaccaaaaactaaaataacaattctttgtttttagatttgatgtgaaaagaataaattctcagtaagagaaatcatattgtgtgtagagtttcagtctacattttggagtgttggggagagaagttcatagctttcttcagattctcagtgtgatgtttctgtggtaggtagggaattgactgcaggaagaaacatgttttgttactggtttgtacctgacccttgtccatgtaaacacagaatgcccctctctgaagtggttataatgtaatctgagtcgagcattgaattctgtgagtgatgattctccgctcacactatagcaaactataaaacttccatgcacacttttaatgaaacaaactagccacatgcaaaagagggcaaatgagttgtgattcaaaagacaatctcagaatgtgggtagagctggcattatttcttccttatgattgaatagctcattattattcatgggtgaactaaaaagtaaaatctagtagtttggagaagtttttatccagctgtggaaagtagctcagtgggcaaaaactctcctctgtcctgttaaagaagaaatgggggctttctagcatagggaaaagatggttgtcatcagaagttggggctactttgtctttaaatataatttttcatgtgtatacttctgagagaagttatgtagtagaaaattcatagaattttaatttgaaaagacatgatccagtggctagtgagaagaaggagatcattatataaaaattttggggtggggcttgaggggagaacagagttggatttctgattctcaattttatttcctgctattgaataagatactagataatattcattggattactttaatatttatgggttttttatataatagaaagtgtttttttcccctcagacttttcttgtaaatcctataggccattgatttttccattctttgtgaattggatattttactaggaatatcctggtaaaagtctaaagatttatgtggtagtctaccactatcgtatggcttcactcactgaggtttcagctactcaccgccgaccagagtttgaaaataaattattacagtaaaataaggtattttgaaatagagactacatttgcataccttatattacagtatattgttttaattcttctattttatgattagttatagtgtatatagggattgatactattttattagtagtcatcgcatatatagggtttgatactattagcggtttaggtattcgctgaggatctggaacatttcctccacagataagggggggctattgtagcattcttccttaagctactgctttctcatacactctcccagagtacatgtatattttctcttcttttcttttcttttctttttttttttttttctgggagggagtcttgctctgtcgcccaggttggagtgcagtggcgtgatctcggctcaccacaacctctgcctcccgggttcaagcgattcccctgcctcggcctcccgagtagctgggactacagacgcccaccaccatgcccggctaattttttgtatttttagtagatacggggtttcaccatgttggctaggatgatcttgatctcttgacctcgtgatccacccacctcagcctcccaaagtgctgggagtagatgtatattttcattacaaaagcaattatattggcaaggtgatgtattgaatcccatgatagttattctttaatttagaggacataatgttactgatttttgtctggagcctcaaacatacccaattacaggacaacctgcattgttacttttaatgaattacatttgataccaggattttcttccttcagacttcttaaagcatgctttcaaatatactggcctgccagtaatttcacccaatttgttcccttagatagggtaatttcatcaaagttttcccgcatggccagaatctgtattagctatttggtgtgctataaatttaaaagctagtagtattcttcccactgcttatatacaaacaaaaaaacagatgttgtgattacactgtaatgttcctgcctaaagtaaatttagatgtaagaatatcgtctttataggtattgtagcaaagtatgtcattctttctcatttagcttaaatggaggtttaataaaattgctacttatcaaaagagaaactccaggggaagactaaataaatgaggtgatattttaaaagttaatgaatgaggtgccttgatctgtggttccattatactcttttcattgcttcacagagctcttaaaacataagatgtgatgaaaagagtaggtaagctaatttgaacattgccttaaaacgtaggcagtgaaacactcttattatgcctaccaaggggctgagagtagaaagtccattattctagaaaacattaggaggcaaaatgtaaaatgcaaattaatcttctttataatataatgaaaattaaaagtgaactgtgtttaaagtgagtaaagctgtaaaaatttggtgaaacaaactataataaaacatatttttaaaatttactttaaccattactttgatgatattactgataattctactttacaagactcatttgtgttatatattatgagcatagttttataatcagtatagatcacactactaatgccaacttatttcacattggtgattctgaaacttctttattttggatgtctatatggctggttttaacaaaactactaaaacatcctgtacttaattaggactcttttttcacaagcaaccaattccaatttgagcaaatttaaaccaaaaatatatgtattaaacagctgctggattatctcatgtcatctaatagtaaaaaaaaaaaaaaaaaaaaaaaaaaaaaaaaaaaaaaaaaaggcttgttctttaggagagacagaaactggatccttaatgtctgctgaaatattttctctgtgctcggtctctgcttctttctgtgtgtctatctcatctctgtttctatgccagctgttgattccaatcctcagagaagctggactagggttcctccacatttatgaatttacgtctatttccaaagacttggattaagctgaaaaagagtttctcaattttaattctacattccttggagaaagagtgtgattgatccagctacatcaagtcagctgggattagaggaaagagtttcacttgctcgtgggcacccatccctgtggatggagaaagtagttatgacagaagaggaactgacatgaaatcccaggaaatgttcattaccaccccgttagataactaagaagtgtcagtttaatgttttcattattttaagtgaattagccaccagagaaaatcttagtttttaagatataagataaattaatatagtgtttttttcattgaataaccttttcttgtactaaataaactagttcatactatcagaaaatccttaaattcttatatcagtattctgtaacttgaatagttgctctttaatttttttatattcttgagtatgcttatggaccattggagaagtggaaaagtaaattttggatttggattaccaggtaaaacttatcctcgttctgatatgaattaggtaattttaaagtggcattaagtaaactacaaagtgtatagtacataaatgccatttagaggtaaaatattattcagaatatgaatacttagaaggagaattagaaattatcacatcccaaacaatttaataggtatgaataagtaagtaatgctcagaagggtacagagtcttttattcaaagttacaaaaactgtttagagaaaacttttaacgaagagccctatcttcagattctcaactttacgttagttgcttagccatatatgaaaaccaaatgaaccaatctgaactgctcctgtcaaggagatgcactctctttccataaaagagaaactctaggaccttaggagatagtaatgcaatgtttatcctcatatgaaatttaaataatcgtctgttttactgattcggaagtttctggtcagtattgcaactgagaaagatacacaaaggcatattagggatatacctattagagtatcaggtagtcttctcatagagtccatgttttcaactcattcacatctctatattacttaagaagatgacttaagaagattgtgcgaagtgagttcacagaataaatagctgtcaataaggctcacccagacgactgggtgtgtgtgtgtgtgtgtgtgtgtgtgtgtgtgtgtgtgtgtgtaaaactgttatggtaaggaatatgcaaaactttattttttctgataaaatcttaagataaatccatttcttttcaggactggtaattatatttctagtaggatttacttattcataattgcctttaatttagattttgaagtcttccattacagtgagttaataaagagaatgagagttgcaatatcttcatgttagtaaagagtttttctgtttatgctctttattttaggcataaatgatttgtaatagtggccatggtttcagtaattcattggcacttaaggggcagtattaagatgttatggtgattagtaaacttttctctgtaacttcagtgctgcttagaaaagtgatcgtgttaatgaaggacttgtataggattagttcatctgtatatttatttttaacaactcaaattatctgcgtaagaacatttaagtacccttatatacaggtgagagcctgcttgttgggaaaaaataacgtgagattaggtatatttagctctttctctactactattttgctgtgtaccattgaaataaatgactttatcttcctaggcattacctgttaaatgtagagtttaacattaaatatccagggtattttctagctctgtttatgtttctataataaatgttaattgtacatataaacataaatccaaatttcatagatgatgatataaacttaggtctcattgttttgaaaatttaaaataaataactatgtagcaatcaattgcctcctattattaactatctttattctctccttagtatcatcccacttttggtaattccaagaactcatgaaaagatttcacaaaccaataatcagcattgatttttaacacactagaagctatagttacccaatgttattttcaattcctttccatatttcatactcatattagtattctgaacttcaagtaataagtatggaagagtcaaaattaaaaagaagagaaaaggggaacataaaacattatttttaactgtggggaaggccattgtttccaaggagaaaataaaatgctgactcccaacattctggggcatagatgatctcctcccttcctccacatccatttagatttgttttttatgaatgggtgcatgaaaaaggaactaataccatatggcattttcaggttcagcaatgaaaagtaaggaaggcaaaaatgaaatattggaataaacactcagagcttaggaaatgggagttccagatctggtgccttgtaccaaatttctggtgatgtttattaaatctctttatttccctaccctttctttcaatatctgtaaattgaggagtttcagctacacttactctaagctcactttaaactgtaaacatatttattttaggatgtattttctttatgtgtttataaacaaatacttttcttcatgtagttgttagctttttaatccataaacatttttcaatacctttacccatatcatttggaatatgttcaggggatacaaataatttaaatatttttaagcaaatatttcaaatgtaaatatttcaaatatttgtttaagcaaactatagagagaaatgtaaagttttgatggcactttctttttcctgtgttatcttctatccttactaatgcattataagcaaggtttgttttttagatagtccctcaagtcagtttctaccaatggattaaggcctaacagaagaccattgctccttaagacaaaacaaatacaaatcataaaactaacaaacacaacgcaagaaaattctgcattaaaaattagttggagtaataaatcacaataaatgaaaaggcaaacatgggaattattttcacaagatgataaataagccaagattttgctcttttacaatctcatttaagctgtaacatacactcttgcaaaaaaaatcgtcacgaatagcctacaggcaataaagagggtgggcctacttagttaattttaaattgtcagctctttttttcctattctttcagtaaaataaactgttttgctgaataagagggttaagaaaaggcctgagtgagtcactccaatttgtttccacattctgaacagtcaataaagaaatttattgcctcattaggcattttgagtagatttctggaaacctgggtgacgtaagacagaaaagtaacctcgtaagatgttttaaaagtgattgcagctgaatttgtttttgaaattgcaagttgcctgttagactggaatggcatcatgatttgtttcaagaaatggtgccaggcagtgggctggtttcaaggagaggaggaggaaacttgtgttttcagcaagaactgaaaaatactgtaaatactggttctgaaaaatactgtaagatgagagaagtgagatgattagaagagggcaaggtctcagtaatcagatcaagagtaagcttcttatgaggaaaaaaaatgaaagcaatgaaaattggaacattaaactgaatgggaagcaaaagccagcaatgtacccactgcatgttgcatcctaacttctgcttagctgatagttagctctctgttcaaatgtggacacttaaaatcctatgtgtccctcagatcaagtcatctctaatcactttgtatctagttttgggcttcaaagacttattagtagccgaatgaaggtagctactttccccacactctatgcttgtaataatcttgaggcaacctgtcttaacttcttttaaaatgactgaaggttatactgggggttggttgataaagtattattattttttgaatgaaggaatgttgactttgctccaaaatgtaaacaacccaggaggcaaaattcatagaacaaatgacttattaacaagtagaacacaatgggttgcttgcctaaactaactttctttttattcttttggcaggtaaacacattaatcataatcagtctgatctgtattaaaaaataacttaataaattaatcacaatcagccatagaacaagtaactttcagggaatttttcagatacaaggaggtaaaatattggtttcccaaaatgaatatatatattcatgtgtgtgtgtgtgtgtatgcatgtgtatacacatgaatgtgacattctatttaagagatttgttttcataaaggaaaaggaaaaaaaaaggaataaaaagggaaaataaagttttaatcagaattctcttcctgttagtcaaagacagatttatcagcactgtttcattctcttattataaaatattctaactttaggagagatcttgaaatgtaaaaagaaggaaatattttctccatcatccattctttcaaacctctcaactgataccttgctactgttgttccattgaatatccggagaataaaatttaagagagaaaaaaatgtggtgacaggatacaaagggagaggcattgggagaagaaacctagtactcatctcatctttgcaaatctctctagaaagtgtcttcatctgcaaaatgtggggtttgaactggatgactttagattgcccttgaattttaagggcaatgatgagtctaacttggtagcctggaggagattaaaatctacttaaaacgttagagaaaaagttaagagcggcaaaatggtgctgtgtttcattactccctttttaattaacattataaaagttccagatctgagatcctgccaaatttaaagttctactttttgacctatccagacatagctcagagatattgtgggtttggttccagaccactgcaattaaacaagtcacataaatgctatgtttacactatactgtagtctattgggtgtgcaacagcattatgtctaaacaaaatatatattttaattttaaaatactttattgttaaaaaatgctaatgatcaactcagcctgcaatgagttgtaattttttgttagtgtaaggtcttgcctccctgttgatggctgctgactgatcagggtggtggttgctggaggatggggtggctgtggcaatttcctaatataagacagcaacaaactttgcagcatcaaccaactcttcctttcacagatttctctatggcacgcagtgctgttcggtagtgttttactcactgcagaatttctttcaaaaatggagtgagttctctgaaacactgccactgctttacccactacgtctatggaatgttctaaatcctctgttgtcatttcaaccatgttcacagtatcttcaccacggatagattccatctcaagaaacattttcctttgctcattcataagatgcaactccgtaggtgttcttatactatcatgagattgcagcaattctgtcaccgcttcaggcttcacttccaattccaattttcttgctctttctaccacttctgcagttatttcctccctgaagcctttttttttttttttttttttttgagatggagtctcactctgttgcccaggctggagtgcagtggtgtgatcttggctcactgccagctccacctcccaggttcacgccattctcctgcctcagcctcccgagtagctgggaccacaggtacccgccaccgcgcctggctaattttttgtatttttagtagaggcggggtttcaccatgttagccaggatggtctcgatctcctgaccttgtgatccaccagcctcggcctcccaaaatgctgggattacaggcgtgagccactgcgcccggcctcctccctgaagtcttgaacgcctccaagtcatccatgagggttggaatcaacttcttccaaactcttgttaatgttgatattttgatcttctcccatgagtcgtatatgctttaatagcatctagaatggtgaatctttcccagaagatttttaatttactttgcccagatacatcagaggaatcactatatatggcaactacagcattataaaatatatttcttaaatactgggctgcagaatggatgttgtgttagcagacatgaaaataacattaatttcctcatacatctccatcagagctcttgggtgaccagtacattatcaatgagcagtaatattttgaaaggaatattttgtgtgtgtgtgagcagtaggtctcaacagtgggcttaacatattcagtaaaccgtgctctaaacagatgtgctgtcattcagattttgttgttccatgtatagagcatagggaggatagatttagcatggttcttaatgaccccaagacttttcggaacggtcaatgagcattagcttcaacttaaaatcaccagctgcaatagcccctaccaagtaagtcagcctgtcctctgaggctttgaagccaggcattgacttctctctagctatgaaattcctagatgacatcttctcccagtagaaggctatttcatttatactgaaaatctattgtttaagaaaaccgcattcaccaatgatcttttgaataacttacttcagcttctccatcagcacttgctgcttcatattgcatttctatcttacaacgatggcttctttccttaaaccttatgaaccagcctcagctagctttaaactttttttcctgcagcttcctcgcctctctcagccttaatgaaattgaagagttagggccttgctctagattagactttgggttaagggaatgttgtgttgttcctggtttgaacgtctatccagactactaaaattttctctatatcagcaataaggctgtttctttttttcgccctgccccgccccgcccccacccttttttttttttttttttttttttttttttttttttttttggcggagtctcgctctgtcgcccaggctggagtgcagtggctcgatctcggctcactgcaagctccacctcccgggttcacgccattctcctgcctcagcctcccgagtagctgggactacaggcgcccgccaccacgcccggctaattttttgtatttttagtagagaaggggtttcaccatgttagccaggatggtctcaatctcctgacctcatgatcctcccgcctaggcctcccaaagtgctgggattacaggcgtgaaccaccgcgctgggcccaaggctgtttcttagcatttgtatattcactggaatagcacttttaatttccttgaagaacttttctttgcattcaaaactttcctctttggcacaagaggcctagcttttagcctgttttggcttttgacatgctttccttgctaagcttagtcacgtctagctcttgatttaaagtgagagacgtgttaactctttctttcacttaaacactcagaggccattgtagggtattcatttatttttgagatggagtttcactctttcgcccagcctggagtgaagtgttgccatctcggctcactgcaacctctgccccccgggttcaagcaattctcctgcctcagcctcttgagtagctgggattacaggcacgtgccactatacccagctattttattttattttatttttttgtatttttagtagagacagggtttcaccatgctggccaagctggtgtcgaacttccgatctcaggcaacccaccctccttggcctcccaaagtgctaggattacaggcgtgagccaccacacctggaccattgtagggtttttaattggcatcattgtaatattattatgtctcagggaatagaacagcctgaggagtgggcaaaatttggagaaaccatcggtcagcataaaagtcagaacacacacaacatttattaagttatctgttttatatgagtggtttgcggtgcccccaaacaattacaatagtaacgtcaaagaccactgatcacagatcagcacaaccgatataatgaagaaagtttgaaatattgagaaaaataccaaaatgtgtcgcggagacacaaagtgagcacatgctgttggaaaaacagtgctgatgataggcttgcttgacacagggttgctacggactttcaatctgtaaacaatttaatacctgtgaaggtcagtaagtgaagttcactaaaatgagttatgcctgtgtatttttccacacgttaattattgctttttgagaaagcataaggtgttatcttttaatgattatttattgattatgatgtttactgaggctcttgtggatggttcggttcaacaagtatttgattcatggctactatgtgttgagaagtgagcatgggaatagaaagtaactctcccgccccaaatcaaaatgacaaatagtcctaggtttagggagtttagaatatgcctggtatataataggtactcagcatacattgttcaatgattgaataaatgcactaagggaaacaattagagtataatatctgtgcttaagtatatatatatattatctatatatctctctatataaacatttatatccagatattaaaatgccaatactttctaaatatttccatgacccccccaagcaaatctttgcctactcctctatctatctgtatagagatctctatctatatagagagatatgtagataatatatatacttatttgttacatctatctatatataatatagataataaatctatatataatataatctatatatgatatataatatatcatatatagatatataataaatatattatctacatatctctctatataaatacatagttatgaagagaagtaggcaaagatttgcttggggagtcatggaaatatttagaaaatattggccttttaatatccagaagttagaatacatatatttacagtaaagatggcaaggaagcatattagttgatgtattttaagaatgggacagatctgccagaaaaaattagaaagaacaaaagttaattgaggaatataatcaataaactggattttttgggtatgtatatatgtaacacatgtgtaataattttacacatatgtagagaaaacttcatactctccaaatactgcatattcatcttttctctgtgttcataaaatatacatatttattgaagaacaaaaaaataaaaaaacaaagaaagtattaacatttgagttggcattccaacaacaaatcagattttaaacattcattttaatcagagaaagcattctagtttacagcatgtttgggaacaattaacatgtatataatgaggagtggtcacagatcacaggaagtgaggctggaaaggtggctggggcaaaattgccaagactttttaattccaggtgaagtggtttaaacttcatgctatgaatagttaaaactccatactataaataatggcattttgtgtgtcaagaacagagtgaaatgacccaggtttgtttttgtgactcctgatccttttagtgtgcccagcctgtccggattaaacttttaaagaactcattgacctatgctctagcaatctaatggagccagtctttaacttctaaagtaatgtactttctgttagtaatttatgatatttaaactatggaactgaacatattgagtagggcttttcaaatggtacatcatccttcaaatttctgaaaattctgttgtcttccttctctccctagtccctcccatcccctcatgcctttctacctctgcattttttaggcttggaacatattaaatggacgcaggtgttgttcccactttaacacaaaccttagaggcacaaaataataaccaattttataaacaaaaataaagaaaataataataccaagagccaggaaacaataacaatgcaatgtaagctctcgatccagatggctgaggttcaaatcttggttttgccactgattggctatgaccttgaccaatttacttaaactccctgcagctagattttgaggaataatgttaccttctctcctagcaatgttggaggaataaaagagttaatagagattatggcctgatgtatagtaggtggtgcataaatattgtagacgtcattgttgttatcgtatagcaggggaagttggtataatttttgtttgtcccttatgttgttttctgacctggaaaggagtaacgctgctccttttaggaacaaccttagtcctcacttcatacataaatcacatgttcttctctttgccaacacctatattttgataagactcaatatctgaagctaaaaacacattcaaatctccttatgttactacttcttgttctaaccaaacaccaacattagtacttattctattttcttgtcctgtctattcatacaatagtggcttttctctgtatctgctttctgcttgtatattgagtcaaggactttttcctcgaaggcctgttttgtgtgtagcagttcaaggactatcaagtcagtcctttatctcaacatactccacaatttgaaaaaataaatctcatttttattagtgtgattttataatttttttataagactttgttaaactttatgaatcttctctagatttctttatggtttacatttccttgtaacttgtgaagaccagatggaggttcagttaagttagggggattggagcattgcttagaacatcaagtcccagactgggccaagagttctgaaaacaagctggctttctgcttatccaaatgagtcatttgggaagccattgcctcctttgctaaagacactttcttcatcatcaactttgattgtggtttcttttcagacctattttgactataaaataaatctgaaaaatgctttagacagaatatcactgcaaaatgtaagctattcttcacattaggctaaatttaacaatgatcctgaatttaaaaaccagagttaaaaatgacaaaaaaaactgtgatggatttattattgacattactgaattgacatggtcagttaggattaaaatattatgagtaatatgaatgttacgttatttaaaataaagagatattaagagactatttgtttttatcattttatgagaatagctagtagcttcccctctaccccttcttcaataaaactaagcagttcaggacatcttgtattaatgcaagaaagttagattaatattaatgataatatagtgttttcatgttgtagttgttcatctgaactgagccttcagtattctttaattttactcagtgaaaataaactttgtttatctcagctctttaaaaataaatggcattgcaggattgggtagaaccctgggcactttgtttggtcttatattactctgaataccaaaattattttttttcaagctagttaaatcatcatttgaaacagagctgcaagactaacatatggactacaggagagtaatagatgtgtcatataccaaaaacagaaagatccattaccctaaatgtgaaattgtgagagggaaggagaatacacaaagtaggatgtctggaagccttttttagactgtattaccatccatctagaaaaatgttataggtaaataaaatatgttcttactgaataataagtataatatgcgcaatttatcctcattacaaagagattttattgtgtgtgaagaattccacagagagccattacagatccattatagtgtttttagtgatctgctctacttcccaaaccgtggttgttttatgcagtatcagatgtataatgtgcatttctatttttttcctgctccaaactcgctatgcttacaaataattaggcaggaggggttttgttgccttgttggccacttcttaaaagcatagtataatttattggaacaaaatatagtaatgcactttaaggaaagttctcttatgtaaaagctcaatctcaaattgaatgaagggtaaatttttattcgcaagaattgacacatttccaataggaaaggcttcatagttgcagtattttattatgataattgaattttataagaatagcaccatttacttctatgaaaatttattctccttgttctgctccagagctttattagcttcccagtatttccccactcttccacctggaattcatgggccaggccccaacttacattgttacttcttttatatataattacttttgcacataagcattttcttccactcagcctccatcttttcaagaatatgtgtgttccttcacttcttggattcacgcttttactttctctacttttcctactgctccaattttttttcttgttctaaaggtctttaaaatttttcccatctctataacgctatttgtggatgtgtgggtctttttctttcaaataaggtacacatctgctgtgctgaactgctcatctatctgtagagcagaaagggagggtacacctgttgaatgtccagagttctccatggatttttctaggtcttctacgttatgtacctcatttaattctcttaacaaccaggcaatgaagaactagcatgcctgtttcatgggcgaaaaaactgaggcttaatgagtccaagcagcttctctcaagtttctttggtagaaagcaaaagaggatagattcaaatccgtctttttcaccaaacctgtgtttgtttgttttttagctttccctatgtgtgtgtctatttcattttcccatctcctgatggcaaggactctatcatgggcaattttatcttttaggtagccgtcacatatctcaattctgcatttacctccttgtgtagctcaggtgccacattttccttcacagtgtttttccgatttttacttattaaaatgatttgcatattcataagtagaaatggtatatttttccttgttagcaaaaaaaaaaagaaaagaaaagaaaatagtcatgtgactaatgaaaactctttcaagttggtctatagtttcaagttggtcaagaacataaaagaacataaaagagttttttatgttttccaagtttgatttctatcaactttatattctgtgtgtggttgataatatttctcagtttatacagctttgtgttctcttaaagaataatacccacttttcatagactatttaaatcttcattgggaaaaaatatcaaaatttataaattatatgaatatatttaattagcacatgtgccccaaaactatgtacatctattatacagcaattttaaaattttaaataaaaggtaaatgtaaaaaaagtacatgaactttgaaccaaatttagacatgcttaataaagcctatgtttatcactttgaatttggtattatttatttattattattatttattactttgaatttggtattatttaaaaaggaatccagtttttaaaactttaaatgaaataacatgtctgaagagagtttctagatgcagcttactcatctatatagggagcaaattacaaataaagtctttaaagaacccataaatgttgagataacgtggaattactgataagcaactcaaaagctgctccttaatattgttcacctatttatcaccttattctaagccaaactcctaaacaactgaaaaagaaagcttagataattggataatatttcttcacaaagtcagcttaaatttctgtctaaatgcattataatacatgaagaaggcttttaatattacttatgctaaaggaaaaaatatgctggttcttttgtcaaccttcttttgtactaattgtgtaagtttgaagcgagggctgtaggaaattaaaacagaaaatagaagtcctgattgtggggcctgttgaatttgcagtgtaacacaggagataaggcatcagtttaaacaaacatagacacacacatataacatctcaagatcgcataatacagccgccaagatggggtcacagatgagttcagtaaataaagaatgtcatggactagtatggtcagagaaattgttaccaaggaggtgcaatttgaaaggacacttcaaagaggggcaggattttgttagttggaaagcaggtgacacagcaatttgggcaggaaggaaatcaagttgcagaagttgcttagggaaagtaggtttgaaggaaacatcagaacaactaaaatagaagctttgctcaaataacaaagtctcgttttatttttatctgttttttttactttacctctatcagtttgtcactcttttcaggctagtacaaactgtcatgttttaaaatctctgtacttttattagttgtaggatgtaagctttgaaataagctttgcaactgtggagattagtgtcccattcctttaagggtctggccaacctaggggatccacagatattagctgctaggtggtcgatcaccttgaaacaccatcctgttatgctgtgtcctaatagcttgagaagctgaaccagaagtatgcagttcacttctacacattctgcagctcttcctgaacaacttcatttttcatctatttcacgatgaacagaaatattctcagaaattctttttttcttttagctaccaagatttgggcctgcttttttattggttatttcgtgagggtaatggggcatttgaccattctaatccgcttttctgagaaccagcacattctgaaaattgtctgagccctctctcctttgactatcaataaggatcacttttagataagtcgaagaagaggccagactgaaacaggaacctgtgaggctccctgttgcatgtttttaattcacacacccacatggctacatccaacagaggtgacctgaattttactcctttgatgttgcataccataaattcccatagcaggtttgcaacaaagggggtattttaaagcttttttctaacatcgccttagcagatactgactgatcctttcccaggaactgagagggtcccacccatgctcctgattttagaatcataaacatcagtaggaccaagatgcttttagagggataaagtgactttaatttatcttgggtggtcaaaacacagcatgtgcaatatttttacaaactatgattcagaaagcacatagttctagagcgttttgttttttgttatgttggtgtcactggaaacagttgtgcttcctgatgtcttactgagatggcctttttggtcattttgggccactttcccaaggatactgcatgttgcctgacctgtattcctgaggaaataaggaggacttagattgatctgttttggacagcgtactttctctaagaatggcgaaaggaaaaacatcagactaggatgctctccagaaataataactgagaatctcatcctgttgtgtaaactctccttgtactttgctctgtgtgtgtttggtggaaatattatttttaaacagccatttactctgaaaaaatatgattttgcattaaattagttttaaagttaagggatatatataagacctttttattaacaagttgatgagatgagcattagtatacctataggaagtttttgaatgagtgccaattctgaatttacaaatcaacatttcttctctccagctttctttagcttgcccatggtgatgtgaagatgagaagaaatagcaaggcccaaccagttcttcatctggagacagttcaacgttctgcaaaccaggtaaaaataatacagacgattttaggaatgcatagtcactttataaaataaactattttctttctcaagtttgatctacagatttttgcagaagctatatttatcatctaatgtataacttgttaataaacatgacattgtatcaatttcgattatctgtgaagagcagagtgactaaagcatgcatttgtgcattgactcattaataaagttatagttgtagtataacttacttttataaaaatattttaaagaaaaaagaggacatgtggctatttgatttgcttgttacaattctaaacaaagtaaagagaggtatgggctaaataaatttaatatttctttaaaaagtaacttttaccaaatgaatacatgtgcatatatttaaaattcaggtaaatttaaaggctagtaactaaagaaataaaccttttggcacaactgcaggaaaggaaccactttcaaactctttaatttttattttacttttgtggttttaaataacatctataaatctatctcaggatttttagagttagtgctctaacaattgatttcttgttgctatagatgtggatttaaacttccttaagacctcaaaattcttgattctcccaatatagctatatcactatttttattgttttaatttaaatctgtatctgaatttatagttagtaagactatacaaataatgtttactgctgagactggtgatgtgatatgattgcattctctttactgtagtagaattttcattttctcttgaagtcagtgcccttccttccttccttccttccttcctccctccctccgtccctccgtccctccctcccctccctccctccctccctgcctccctccatccctccttcctccttctctctctctctctctttctttcttttttttgatggagtctctctctgtcacccaggctggagtgcagtggtgggatctcggctcactgcagcctctgcttcctgggttcaagcgattctcctgcctcagcctcccgagtagctgggattacaggcatgtgccacaaagtctggctaatgtttttggtatttttattagaaacagggtttcaccatgttggccaggctggtctcgaactcctgatctcaagtgatctgcccgccttggcctcccaatgtgctgggattacaggcgtgagccacctttattcttcttttgctcagtttctccctcaccatctccctatctcccttctcccctccttcctttttccctcccttcctcctattcttcttctttttattttttttctaggtcttcccgaaccctccattatctttataaaatgcctttctattcaattttctacaatgacaagctggtcaaataatctagaaaggtccccttcccactacccttggagaaatctctcctgctaccctggctccttccagataaaagtagaaagagacaggagacttttatctccttccacttttaccttccacttttatctctagttgcgctcgaaggcttcttataaagagatgtcatttagggttttgtttttgtttttattttggctgtcgccctagtttattcttccattttatgatgtggtaggtgttttttttgttgttagtttttgtttttgttgttgttttttgttttttttctagaaatcatgtcctctttttacttggctctgccaaaaagcttgattttaccccagtaaaactgatgttaagtttctggcctccagaactgtaacggaagaaatctcagttgtttttaagtcagcaagtttgtgggaatttgttatacaagaaagaaacacaatttgcattagagtttctttttcttcctcattctttgcaatgatttttggaagtagaaagttatggaaagattatttattttaccttcttgaaattggaatcctttagttatctgatttaagatagttttctttttctttgctataaaggttatatccaccttcagaacaatgatgcattctcagttgtggaattttaatagagtcttcattcctctcctcgtcttagtacgttatctcctgtcatatcattctctcctcttctcccctcccctcccctcctgtactctccctgccctcccttcctctccctttccctcccctccaccccctgccctcctctcccctctcctcccctcgtctcccttcctctcccttcctcttttctccttttcctttcccagtaatccagcagttgcctactgagtgctagatgttgtgacaggctttggaaatactgaaaccaataaagcagtttgatgcctccatgaggtcaccatctattggtatagaggagggacaaaagtaacatttgtttcgtgcaagacataaagccaaaagcagaaataaaatcaacaactaaaatactgtactaaatacaaaatcaggccaggagcagtggctcatgcctgtaaccccagcactttgggaggccgaggcaggcggatcacgacgacaggagtttaagaccagccttgccaagatggcgaaatgctgtctctactaaaaatagaaaaattagccgggcatggtggtgggtgcctgtaatcccagctactcgggaggctgaggctggagaatcgcttgaacccaggcggtagaggtttcagtgagccgagatcgcaccactgcactccagcctgggtgacagaatgagactctgtctcaaaaaaaaaaaaaaaaaaaaaaaaaaaaaaaaaaaaaaaaaaaaaaaaaagaaaggaagaaaagaaaagaaaagaaagagaaaaagaaaaacaataaaaaacccaaaaaactaaattagatacatgaacaaaatattgtgacctcacataacatttagcaaatcgctctgcttggcagagactgggataatttattgaagagtgcttgtgcagcatcttaggagatgaattagcattttagaaagaactaaatgggagaaaggcattttatggcaaggaactggctctgtggaaggcacacacatattaaggagcacacgtttcttgagcatggccagatatttaatgtgcccagaacatagattaagagtggtaggagtgtgggctaatgagactataaaggtcaaattatgatgaatattattattattattattattatttttgctgtgttaaaagtttaggtttttattattttggaaatgagggaaactaaaggtgttgagcagaaaaatggcatgtattttaggaagaaaattctggcaatattttgattattgagctgctggagagaggctggaaaaccagggaaggggctttgtaagaaaccaggtgagcagtagatgacaattacctgagtcaaaacagtagaggcactgggacaagatcagagaatggaatcaagagatatttctgaaaccaaattggcagagggatgaaatttctaccttttagtgaaagacagtaagtgcaatgctagcagtcacagagagcaactggatgccaggggagagggactcaactgggtctgggcagaagcagaggaggtgacatctaagataagtcttaaaagagagaagaaacaagctacatgaaaaagaagagaagccagaaaaaggagagaaagcagattgtggctgcagggctctccaaacaccaaagactctctagtaaaaggcatggccatgacaaacagagtggctgctggctttgctttaattagcatataattattggtggagaaagtctggtgggaggtaaggtgggaaggaaccagtcactggaggcttctggttaatgtccccatcctttctttccctaaacatcactcttaccctgtgtagctgggactacaggtgtgcactatcacacctttgtaactttatttttttgtagagataggatgtcactattgcccaggctagtcttgaactcctgggctcaggcaatcctctctcctcagtgtcccaaattgctggtatttcaggtgtgagccacgtgcccagccccttcttaaatgtataccagtctttaggcctaaaacaatcttttatcaactgctaagacttccttcttttaaagatatgatcagagcttttgtctttcacagcaggcatcctagtttcatgttttcttgggaaatttgtatagattcacactcactacaaatgttattttcagctgttttatagatgtataatgcaccatttattcattcagtacatatttagcaagtaaaagggaacaaccaagattcattctatgccttcttttgttggaattcaagcacactaacaatgtgctctcttgttggacaagcatgaaagaaaaagataccctccttgtcaggtcttcatagttctctgtgcttacaagaatcctgcaacatttgacgatttcttctcaagctttccttcctgaaaggaaaaagggcaagaaaagaataaactttgtaacatgtaatctgtataatatattccaaaatgctttagctcagatattttggatacctttctgatcacatgctatagttagaatcaattttctttcttaaaagcttgaaagttaattaattgagctatgacttggggacaaaatgaaaacaattcccccatccaattcaacagaaagtgggatctgtaaaaatagctcttcttgaaaattttagaactagaatcatagaactttatttgcttttatattcattatcccataatatcctcttataaatggaagtttagttctgatcatttggatattagctcagggagctcaggaaagtagtatgctgccgttgattaactcttcaggatgctctaactcaacaggcaaagtttcagtaacagcataggcacccacagttttaggtactagtgatttagggccagttgtttaagagtattaactcaaattcggcagccctgctcctgagaggcttgccttctttgccaacatcctctgattcagaatatcctaatctaaagcctgaagacagtcataaggaggtgaatacgatctttacatgtactatattttatttttgtagaagttccagagatagtattttacccatatacaaattagtgtcttggtatggtaaggatttttggcaccaaaatctctaaggggatttttagaactaaggagggctaaagggaaagataatttgaataggttggcctttccacactccttgagttgtggcatgtgacatgcttttcactatctgctgaaggaagccctggtttatctcagaaacattcttgtataagtgccaaatacagtcttgtttcttgttcttgactctgccactccatgtggctgtaatatgctggagcacatttgcctaatgcctccggtatcttttccttggttaaaattgttattaattccacactatcttcctaggtctgtctctggggcccaagcagatttggtcacccaacagctagagcaaccacttgactgggtgaactctattggcaatgaggcatatgggggccaggcagtatcatccacgatagatgaaagacaatctgggtatcaggaccccagttaagcccaggcctcacacacaaacgatcctcccttgaggagctcaatagttgcccctcaaatagtttcccataggattagacttcagctttgacctgtcactattgtagacatgctacctgtgcttacttacttacattaatgtagcaacaccagtgaacacaagaatcaattatacatgtgcatttcataacacccctccaggagccattcttcctcttccttcccagctcccattctaatcatttattcattttttaaaattatgggagatcatctaatattctctctctctctcaccttcatatttactttctttatttgttttagtgggtttttttgttgttgttgttgttttaacaagagctttgaaaggcaacacccaggcagtatgctttatagatttatcaaaacaaaacttgttgaactgggtgctcttgaccaccctgctctctgattctcaacatgagatttcacctgcacattctgataccttgctgagctttcacttttcattaatgacctaattgtatagttttctctgtgttggcatgcttgttctcttccctttccctttctccttccttcctcctttccttctttcctttctttctttcttgcttccttccttccctccttccttctctttctgcctttctctctccctttctttctttcttctttttctttctttcttttctctctcttttttttttaaagcaacctcactcaactcccagttgctcacccatttggctacatgtatcctcggctgcagtaagatactttcttgcttcccaatcctttgggatctgtacagatagggagagtctcagacatgagttattttagattgtctgagaagatctaattaagggtcaaagtagtagatgttgtgggagggcatttgtcactggatgagatgactgtcaccatatgctctcgaaggagaaaacaaaggctatagacagagatgaacatgattttatagatttatttttaaaatcttcctgtgaatctaagcaacagagcagaagcagtgaaattgaagggaagggggaaatttccattccttaaaaaagaagaatcatttcaaattctaactagatttgggaaagtaaaatatttgaaaaaattaagggctttaagatgtgtgataaagagaatgctgaaattaatgatacagcaaagttggaatgtctgcctctcctttgtttaatgtttttcttttattaaaaaagatacttatatgtttttttaatttagaaaatatcagaaagtaaatccaatattctactatacagagatgatagttactgtcaacattttgatacctgatcttttaactatattgaaaaatactcgtcttacaaaattggaatcatacattatctgcagtttgtttctttccccctgcttttgcttacctaaagtttacatctcatgactcttgaaaataccatttttaaccaatatctaatatatcataagaattgatatactctattttcagttttcctggcagttataaacaattttgtacaaaaatggtgcacacattacacatacccctatctcactaatgaatttcttacaaaagggccctcaaagtatcactgagaatcgtgccccatcttagagcctttcactggtacgtccctctccacaagtgcttttctcccatatattacgttagactcccatattacactcagattattgctgaaatgttaccacaccagaaagacatttccctgaacccgtatgtaaaatgtcgtatctgctgcctccgaagttatttgtcttatcctgcgttatttttgtcttaacgttcagtagtacttaatatgtaatgtttatttgtctacttgttatctctacctcatagaatcgaagataaacgaggcagaaattttgttttgttaaatgctttattcctagcatctgaaacagtgcctgagacatagtacgtgatcaataaatacttatttgttcaacaaataaatacataaaaacaaaaagtacaaaacttttggtacatataaataagttgccttccagaaagcctgttttaatttgtatactcatatgtaatgtatgacgatactcattttacaacagaataacccactttgaatattagtttttaaatgataaaaaaataaaaatgtacactatatatcaatgttgcttcaggtttttttgttttgttttgttttttgttttttttttgagatgcagtcttgcactgtcgcctgggctggagtgcagtggggcgatctcggctcactgctacctctgcctctcgggtttaagcagttctcctgcccacagcctctcgagtagctgggattacaggtgcctgccaccacgcccagctaatttttttgtatttttagtagagacgggtttcactatgttggccaggctggtctcgatctcctgaccttgtgatctgcccgcctcggcctcccaaagtgctgggattacaggcatgagccaccgctcatctcttcctcttctttatccattctttttaaattaaagtgtttgctcctttttttcctttaaaataatgtgcaagagctgttatgcattaataatgttgaagttattcacatttttatagacatgtttctctctttcataatatcatttttaagtgatatcgtaatatcatttttattttagattcggggagtacacgtgcaggtttattacatgggtatagtgtagcatgctgagttttgtgtatgaatgatcctgtcacccaggtagtgagtatagtacccaatacgtttagccctttcctccctccctctcttcccccgtctagtgaccccccgggtctattgtttccatctttatgtccatgggtacctggtctttagctcccacttataaatgaggatatacagaatttggttttctgttcctgcactaattcgctgaggatagtggcctccagctgcatctatgttgctgcaaaggacatgattttattatttttcatgactgtgtagtattccacggtatgtatgtaccatattttcttaatccagtccaccactgatgggtatctaggttgattccatgtctttgttattatgaatagtgctgtgatgaacacacaagtgcctgtgtctttttgggtagaacacagaatatacttttaagttttccttatgttttgtgacattttagatttaaaaacatgtgaaatcaaatattagaagatttcttccagcaagcttacctatattgttgctacagatttcaaacacatctcttattttttaaagtttgtcattgatttcactgttgtaattttccagtgtcatttatcatccttacttcatttttttttaaatccattatggtttctttcttttcttttttttatttttaagtgtatacctccgtttcattttcttccttttattttaagccatttcctccttcttgtcctgtatgatagggaacatggctttgtgaattttatttaaaatccctgttttcacctgttttaatagtagtatatttacttattgctctccttttaaaaatgttcttatcccattttctctgtagtatttgtgtataggctccacctttatatttgtttttttattggctcaacactctggattagcttagatctatccaatgtcatgtttacaaccagataactcctgttgttttcttactattcacttcttgctggttaaatcccattcatgctgattaaatccacttcatgttgctccagctgggtgacacgttggtgtgtggacctcccagcagctagagaccaggacacatctatgcaatctgactttgctctcaatagtaagtaggtctcttatgtcccaaaccttgttatatcacaaggatgaaaagctactattcctagtacagtaagttcatttcttcaccatcttcctctctctcctactgtataactcattttaactaattttggggggatgtaatgtgttacatgccagccctccctgccccgtcctcccccaactccacctcgctgcaactttctgtttttgggtactaatgccaaaataggaagagatagtgatataaggacaccgcactatgtaccctaagaaccagcaccttctattgatacctgatgtaattatggcagtccaagttttggtggaacaggccataaatatgactgcagttaatcaagaattgttaaaaataccttcttaattttcagatggataggactaatctttctacaatgcagaccacctgtttttcttagcccaacatcattagctttagaagaatggtaaagatattaccgctattaatcttagtttttagaattgttgagagatgtacttttcagtttaagtattttaacaaaaagttagctgagaccaccttgtgatggtggactgctatccagatgtcatggaaaactaaaatttttatggcaatatttttcaggtctttgattttagttcaactcttccttcatcccaaaatgactatcttccaagacattccaaatgattggacaaatgcatagatgcataataggattagagtagaaaatatcaacatgacataataagtagcaagtattttcttttattatgtgatgttttgaaattatgtctttgtaacttcatatattattattatgtcataccattttgaatggccttttatttaattaaaatataattttaattattttcatatttattctaacttagcatctctaaatacacatcatagggttttagtggtagaattatctaagctattgagatgtttttcaagttagatgaacttagtgaaaaatgttctgcaatgtttgataaaatcaccacggcatctagagcagtggacaatatccccgtgaaatgatggtggaaaccgaccaacttttttcaatagcatcctggtagtgatcttttcagtcacttttaaaatgggatttttttctgtaacccgtatgtaattcagaatgtctgtggttgttttagtcaactggccattaaaaaaaaatacattatggactgtgaactcaccaaggccctttcaagtgctgatgtatgttttatgttttatgtaggttattagtgaccttttttgcacttttatcagaaagtcctttgttttgtgcatgtagctctgtcagaatagaggccagatcttcaggtgtttaattgcagacttctaatgcataagacctgctggccttgttgacttttagaagttatttgttagtctcaaatgaaagaaacaagaaaaaaaaaagcttgctctttttataacagagtaagatgaaacatgcaatgatagggtggtgctgagttgtagaaatttctaaaaactaggtattcctcaaacagtaattagaatttttgattttctacatatctattggctaaagagccaaaaatggttttcaataatgcctgttttcaatatataaaacgtccataacagaatcactaaaagacatcaaattattattatttaaaatttattgagaggcaatgtcaatctgttttttcaaacctatcagtgactctctattgtatattggagaaagtagaaactcttaatttctgccctaacccccacccataactgattttaacactcctattaccacattatttgttactgcagtttttaaaattgactctatccatcagacagtattatttggccgctgtttttttacacctgtcttatttattcttgattttttttttttggtttgtctgttttatttatgtcactgtccactttgcagacaatttagttggccaggtatccatgaggaatattgccattcctgcactgtgctgagtcagacatgccttgtggcatcatcaagtaacaaggttgagaaaacgtgggtgtggcaaatccatttctgagtaacagcctttttggagggaagagattggctaatccaatcagtatcaaagcctgtgcttcttaattgggttgtattattcaaaagcatggatttaatttgaaataaaattgcctgatgtttctgtatcattgatttattgatggtggcggctactattttttagtgttttcaaggaatatgaaaacttacagtatgaaatttacacaaatctgtagttttaaaatattaccttttcctttagtgtttctcctattttccgttagtttgagttctcattttaaaaaaatgttaaagagaaaaaacatttgtctgacatagagctcaaaaggaaattctcattaaaacaactatgagaatgagagaaatcatgatactaagatagtatgtaatctttagagtttaaaatagttgttcctagcccctaaagtgatattattttgacttccttaagcatagagaactttgtttacagtagttctactctgcagttaggtgtaataaaccagcattctttacaaaactcaaatgagaccttggaacctgagctatatgagtaacacatatatgatcctgtgatctatatgatatattatttgtcatttctctattcccagcttgaaatttaatataaaaaaaagtttcactgcttcattctaaatcctgtttgatccaacatggaaaacattgttttagatttcttaatgtaaaaaaaaaaaaaatatatttgactggattagatagtagttactgcaaaaagttactgcaaaaaaaaaaaaaaaaactcggagtttacctttagtcacatcttcagtacattttctattaaagtatttctagattttagtgtctgcttggttttggttatctaagctgtaataagtagccttgggacccctgaaggcacgccccacacacttatgctgtgtgacctaaggtcacaagtaatggctgcaagctaattgattgagaaagggttgtctggcggggcctctttgcgtcctccctttacattcctaagttctgtgaaagaggcactagtagctcaggctagcaaggaaggaaaaaagaggaagtttctctctgcgttctgattacactctgaattcccttgtagtgagcttacttctctccacccacttcttaccaagaactccttaacttgagggtgaacaacttaaagcttgatcctacagttacctgaaaagtgatttgagtattcattgaactgaaagaacaaatcgcctacttcaggcggtggcaagcgtatggaaattatattagaacttcagcaaagtgcacagctgcataatagagaagccggcactcagattgacaggcaaataagccagcttgtggaaggggcctctgggtggcagctctgggcttttgggtgttggacaaccataggcaaaactgaaatggaacaggggcagaaaatagcacacttttactctacgcaactgttgctttttcatggtgagtgcagatttaagatattatatttaaaatatactttctatgttgtaaaacaagttaagaaatctgttgtgctttgagggaaattatagcaaaagcatttcttagaagttcttagacgatgtggttttgtttctgcttgatttcacactaaccttggtgatgcaaacagaaaaatacaatatttgtattgtctcgtgtgtcctttttctgaaaattgtcctttggtttaaatcatgcttctcttcaacttgaatcagcattgttttaggcaaatcatgtgtgggatagatgatgaaggaacaacggtgtgacagaatatatgtaaacatttcatttagttcgactttgtgtcacttctccacggcttcatgttttgccgccttatcttaggaatatatagcgcagtctgcatgaaaagagctttgtgtgagaattcctggccagttgaagggtcagggcctgtgcgttatctgactgccagcaagatcactggtgtgtcctcttatttttaacttaaaataggaaaaaaaaaagtgcatctttacatattaaaaagtaagtgtgtttgatttcaacagttcccttcttgtagtatgtggatgttattcctggcaaagaattgtttaaatttcttttaggaagcggcatgcaaacttcttttgtttctttttgtcttgtttgctcatatttcattgaaactttacacactttaaaaaaatttgaaatggtaccaagtagtttttattttggtgcaaatattttgaaagttgctaggcttatgttttctggagaacaatgtctcagagtgtaaattttgtttaactccccgtgtagtcatacttataactctactttaaatgtgcttcttattttaaaaatatcagagcctatagagactattcctagaaatgttaatagaaatgtttttctttggcaaaaattgcagattcagttttacaatttattaagtgccaagatatcattgctgttgttgactttgctaaaaaagcaattttattaacaaggtgactgcattagatgttaccaactgagacgaagtgaaacatgtgctttcaccctgttgatctgatgaaatatagaggtctgtgtggttacttcgtgcgtcacattcatttaaactttttaaagagcagctgcgtaatacaaattttgtatactcacttaaaaaataaaatttactagagtaggctcttgtttttggagacttatacattctgtttgctaaagtaaactaagaaactgaaaaaatatattggagttagaagctccaaaactcttcaaagggaagaaagcttttaagaaaaaaatgaatgtgctttcagttataaggcaattttgaagcattacttagctctcttttgcaaagatttaaggaaaaatcaactgttgtggaactaagtaataggcttgcctttatacaaaaattatgtataaaaagaataattattttccgaactgtttctatgatttgatacaagcttccttcaacaattgcaaaatgtgactgacaaatccttttctaagagaacaagttcattatgctctcgtcacctgttacattcattctcccttgcccacatacacagttcctagctgtttattagtgctgcaggaaagtgaaaatattttttttgaaagaaaatgtcaaagattttatttgcatgaatcttttgagctttaaaaaattgtggtcttatcataattgcccaaagtgttttgttaataaggtcttttgttattatcttaatatgaatagtcaggaaaggacatataaatcattttggattttctttcactatatctcaagtaaagttaaggtgtggctgagggtttttaaaaggccaagagattagacctttgaaagtttatcctttttgtataaagatgttttaaaaaatgtttaccacttacctattccctccaaatgaatgtaaagaccaaaaattaaagggaactttattattttacttggttataaagtctaaccacaaggcaggaagttactaggctttggagagacgctacaaaagaatgagcttccctctaatgaaagtacataaatcgtgaaaaactaaagacctacttcttagttctcctaacatttaatcttaaactagtaacgcctgtcttttctttgtatatttacttattgatttgctgctgagacagaggcatcttttaaaaactgaagtcaaccacataattttaataccatgattttaagaaggtgtatattttcttatgtaaagctagtcttccatagatgtttagattacgtatttgattactaggaaacagtggctatatggtcacagattaatatatgctgatctctcttatctatatataaaacatatattcacatacaaacataaacacatatcttgtgcttaggcctctaacatcttaaggcaatgtcttttcctcctagttatgcacttagttttgaagacatgtgtagatgaaataaaacgaaagagtcttctgacaagtgttctgaataaaacaagaaaaaaaaatgcttcaccaatggtgtgaagcgtaacaccaagcgcttgttacagaatatatcactagtgggtttgttgcttttcttatgtatttattaccatattgatgattacttctcctttgcctatagaccaggttggtggtgtgtgtgtgtgtgtgtgtgtgtgtgtgtgtgcacttatgagctcacatagggatgagagagtagcctggacatgtgccagggttatgacactctttgatttacttcttcagttctcttggtcactaaatttcaggctcttctgtacccttgtagcagttgacagctgatacagtgaaatcgtgccttctctttaagagtacatattatatcagctgcattctttcaaatggattgaacaatttatgttaaagatgatttattccatcaaaatatagaaaataatctataggactagatcctatcatcccagacaaattatgggtccttaaagactttcctagagagtagcagtatagttttattcttcttcttactgggtagagagcatagagtttgttcatctttctagacactttgatcttcctgaaattatttccacaattttgatcccacaaagcacaaatattgctttttttttttttttttttttttttgacagagtcttgctctgttgccaaggctggagtgcagtggcgggatctcggctcactgcaacctccccctcccgggttcaaatgattcttctgcttcagcctcctaagtagctgggactgcaggcacccaccaccatgcccggctaatttttttttattattatttttagtagagacggggtttcaccatgttagccaggatggtcttgatctcatgaccttgtgatccgcctaccttggcctctcaaagtgctgggattacaggcatgagccacagtgcctggcactgcttcttttaacattagctctaatctctttttctggaactccataatagatatatgttaaagtttcataatatacatatttcttaaattctctttcacactattttatatatctatctgtgctgcacttttggtgaattactgagacatcttcccatttactaattctttttttgactatgtccactccagaatttatttttttgacaatgtttttcttttctggaaattttaattgattctcatcgccacttcaaatgttttatttctacttactttgttacacattgtattgatgttatttcttgtctcttccaaaatcctagcatgcttattttgaagttattctgaaaccgctctattattttcatgtcttctggaataacttcactgaatgttgtttttaaaattttgctggtgcctttttatatcattctctcatggcttagaattttggttttcaggcttaactggaatgagaaggatttaaaaattctctctctctctctcattgctagcccttctgcaccattcctattgtcttagtgttggctctgtaccctctcgtttcccagtctataatctctgctaatggggatatcaaaaacctagtcactaaatcaaagagcagtctgtcccaggatgtgactgtgagattatggctgcttgctttggcctccccaagaaagcagctctatgcaagccgtggctccaggaaaagggaggtgttagtcagttgttcggcttcctcttgtcttaccttcaggttttaatcagtaagcttggcactgattattactccctgtgggacacatgtggcatccagttactttgcagatacaaggattggcttgcttctcattctagacaccatctggtgcagtgtacctcactttgtgtttatagtttatttctggtatgtttatcttgtttttgactattacttttcttttatatcacctcttttaaaacttatctattattgttacatgttggaagcaaaggcacggggctcaaaccatattattgcaatgccatcttgacaagagttttcaaagccgtgggctttggaatcagaaaacttggtttcaaattctgactcacttatgatctatgtgttaccataagcaaagtctttaatctattataaacctccttttcccttgcaaatattgatagtaatgcctacttcgtatgactgttgtaagcattgaatgtgaaaagatgtggaaagtagttaggcctgtgcttaaacattctgtgcgtgcaaattctggaggtggagaaaaagcaattaaaaccaaaacaaaactagatgttactgattatgtaattaacaaatggtaattggagtatcaaatagacttgcttcttgtattctgagtgaaagtaacactatcatttttgatatctaaagcacatttctaaagatgactgctgactgcatgagtttccacaggtggatcaaagctctgttacactatccacctacaccattcacctaattcagagaatcttaataaaatgaaaagcattcttcagaatgaccctttaggtatggttctctaaatccatgtcacttaagacagatggaaaagaagagagaagtggcatgagaacatgcttgtggcttgatgaatagtaatatatataccacccaggttgggtttctgtaatagtgaaaatggggaggagggtggtgatcttttgtaagtgtttcagacagtcttgttttgttgctttgtagctactttgtaatattgtctcttttaaaaacatatattttgatgacctagcattcaaatttatagcatcagcaaagggtcggtttagttgagtgggaaatgaaattctgaaaacaaaaagttttaaaaataagaaagatggggatgaagataaagaagcagtagtagcaacttggaatttgtcttagaatttgaaaatagaaacaggtttctaagaatcagtcttagtccattttctgttgctataacatgataccacaggctgggataaattataaaccatagatatttatatggctcatggttctggaggctgggaattccaagagaatggcattggtggaagcaagaatgtgagacagatgacagcagagagcccgaggggtagagtcccttttttaaaaaacttttttctattttaagttctgggatacatatgcaggaagtgtaggttttttaacataggtaaacatgtaacatggtggtttgctgcacctgtcgacccataacctaggtattaagcctaacattcattagctattttgcctaatgctctctctccccacaccccatcccccagcaggccctggtgtgtgttgttcccttccctgtgtccatgtattctcattgttcagctcccatttgtaagtgagaacatgtggtgtttggttctctgttcctgccttagtttgctgaggataatggcttccagtctctgcaaaggacatgatctcattcctttttatggctgcatagtattccatggtgtatatgtaccacattttctttatccagtctatcattgatgggcatttgggttgattccatgtctttgctattgtgaatagtgctgcagtgtacatatgcatgcatgtgtctttgcaatagaatgatttatattcctttgggtatatacccagtactgggattgctgggtcaggtggtatttctggttctagatctttgaggattcaccacactgtcttccacagagcttgaactaatttacattccaaccaacaaagaatatttaaagaataagcagaagatgctcctacaaatggaaatgaaaggaagaagctaacctggtggaaggaaagccagtggtttggccatactgcccgaagtatggccttactgcccaaggattcccttttacaacaacccgttcttacaataactaacccagcccagcaataacaatccatttatggaggactccaccctcatgacccaatcacttcttactaagccccacctcttaatactgtttcaatggcaatttagtttccaatgtataaactttgggggacatatttaaaccataacagaagctattgtcaatatgtcctcaggtaggacatttatgaaataagcattttatttttctttcttaccactgggtttccttccaccagattagcttatttctttcatttccatttgaaggcacatcttctgctcattctttaaatattcatgaacttcactgctttttcctgggttgccctctcttacttttctttctcctttgttcatctcatccatctccgtaacttcagataccattataagcccatctctagcctgtttcttgctctcaaactttaagccagtatattcagttagccacaggcacttcatcctcaagacgtctgaattcaaataatcatctttttgccagaatcttttaccatgtcaatccatcatccacctggttgcacaaaacagaaacaagatacgaactttgtcttctctctttctgtctctacaacatttaaggcttttgaaatattgatttctaaccatttctatttttaatcatttttttaaatcacagctacacatttcttactatatgattaatggtggaccacttcagagttgtatcacttgaggacaaggaagctggggtgtgtatctgaaactcctttctgtcattggttgaaggttactcctgtgaccatgaattctagaatcccagcccatctcaaggcaaccctagcatgttcttggctagagaacaccctcaggcagagagtggcaggtgcttgcagtaaaacatcctcaatgtgtaaggaaaatataagtgccaaggttatatgagaacaccgaaaacatctgcattgcacatttcagaggcatttaagttgtttctatgtgtttgctatttcaaacagcattgcaaagaacacaattatatatgcacccttgtgaacatgtatcaaatttttcttaggataatacccaaagtggaatttatatgttgtgagatatatgtggtctcaattttaccacttttccaatcactctctaaaatactgaaatttctctccaagggtagtggacaaatttctatttccatcagcagttgctagcattcccatttgcctcagtcctttccaattctttttttttttttttttttgagacggaattttgctcttgttgcccaggctggagtgcaatggcatgatctcagctcactgcaacctccacttcccaggttcaagcaattctcctgcctcagcctcccaagtagctgggattacaggcatgcgccaccatgccgggctaatttttttttgtagttttagtagagacggggtttctccatgttggtcaggctggtcttgaactcctgacctcagatgatccgcccacctcggcctcccaaagtgctgggattacaggcgtgagctaccacgcccggcctccaattcttaatattgtccaatgttttaacttttatttgttgggtaaatgatattttaaggcttttaaaattttcatatttttgattctaaatgaaaacagaaagatatctagtaaatctctgaaatgaagtgagcgatggagaccttatatacaaaatgcaatacattcatcatttttattataaatgtatctttatttattcaagtgttctcttcagtgaagtgcttccttataactttgacaatctttattaaattgtttatctttttttattgactttttggcatttgctatatacattctgagtgctgatactttgtcttatatgtttcaaataatgtctccaaggctatcccttgattttaaacttttgttatgtttttcttataaagaaggtgttagaaattttaattatttttaagataaacatattcatgttgaaatcacaaaagtagacaatatatagagtgaaaagtctccccaccatccttgtttctcatccactccgctcccactggccccttgtggggttcttgactataaaccaaataaaagcatacaatttacacctccttcaattacatacagtgttttaaaccctgcttttgtcatgcaatgtactgtggagatatttcaagatatgtaaggaactgtgcttcattctatgagggatgaaaatatgaacacaatacacagcctatccactgaaagattagtctgtcataccatgttgagagagtcataaaacactgggaattccaaggggagatatttctttccaactgaaagaatattcttcagaacagttgagaatcatgcatcaaggagatacagtttacttcaacaccagaattttttttaatccaacatctttcctttatttttttctcttgagacagtgtctctctctgtcacccaaactggagtgcaatggcacaatctcagctcactgcaacctccgcctcccaggttcaagcaattctcctgcctcaacctcctgagtagctgggattacaggcacgcaccaccatgcctggctaattttttttgtatttttagtagagacagggtttcaccatgttagtcaggctggtcttgaactcctgacctcaggtgatctgcccgtctctgcctcctacaatgctgggattacaggcatgagccaccgtgtctggtctccagcatcttaaacattaagctttctatagctgagaaaagtgtagcaaatttataactgaagaaaatatatattaagaacctagtacatatcaaacactgtgagaggtatgagggatgtaaaagtgaacaaggcagatagtccttgattttgtgggaggtaaaggctgagagttgaactgcaatgaagatatggtggataaagtgtgttaataaaaaggtattgggggtgtagcatgtggacagggtgcatgggtttcagatggagtcttgttgaaagagtagagagatatgtaagtgagagtaagcaatgttccaggcagaggaaagagatatgaaatattataaaattgagagtctggtgagcttgagaaactgcaaaaagtttaaattgtatggagcaccgagtgctgggagtggcaaagggctgagaaggaggtttggagataaatactggctccctcctgaaaggtctagtttggattatcctaagggcactagagacaaatctaaagggtttaataaggttggcaaatggttgtatattttctttatttagataggaaaatatcctggaacatgagtggtagttaaaccaagataatatgtgccatttctcaagaattttttttaatgctgttactgtagttacttagaggattcgaagataggcttcagagttattaaaaactaccagcgtttatatgctgtataagcactagtataaagaagaatatatgtacatatcctttattaaattctcaaacatttcattgattgaaacattgaaaaatcactagattaaattaagaacagtggttgaccagaaaagtacccttaagaacctttaagaaaagaacctttaagaaaatctttaagttcagagaaataacagagagaatcatggaagccaagtgcatgaaagaagaaaaagattccaaaattaagtcctttacataaaacagttaaattccctcatggtacaagccagcctttctgtgctaatggggccgttctgctcctcaaggtaattcaggagcccaggtttctttcaccttgttgctctctcatcccacaatatgttgccttttaggttgcagacatcactgagttcacatatgaagagaaaaagagccaagtttcggagaccacagcctgtctttaacttgaagacagcctagaaattaaacacagtatttctattctactcatctaattgtagttacacagtcacaactgcatatgagaaaagttgggaaatgtggtttctagctggaaagtcatgtctttaagaagagggacaatgaattttaggtgaataacaagcagttgtcacaccaaccttttaagtttcaaaaactattgagtgattaaataagtttacatactcattaaacaagtatttatcaagtgattgctgtatttggttgattattctatgtgatagcaatatagactttttttttttaagaaaatcattaccaagtggtacatattttagaaaggagagataggtgttaaccaaattaccaaataaatatgtggataaattaagaagtaataagtattaagaaaaaaataaatttaaagaatagaggggctgttttcagatagaatagttagagaagggctttaggttaaaaattgcaaaacgttctttaaaggatacaaaattgagatctccctccttggtcgagattttgcagttgagttgcaagcttagaacagtagttgaaatagggcagggagcgtagctcattggaaggagattcagagttaaagtccaaggagtgttatctttttaatgagtttgggggccgtgattacagcttaatgaacaaatgcatgcagaaatgagattgttgagatacttgtgctgacaggaaggagggaatgatgggtaaataagaagttagcaaagctactgagagtgagggttgtgtggactgattccagttcttgatgtagtcacataaaggcacggagttgttatggaaaccctccaggaagttgagaagtccgagtctagtaggggaggtgtgtcatgagactgaacctgtgctagggcttctctagctgtgtgcactggaagggtacctatactaggtaaagaggaggtggcaatgagagaggtttaagtgaggaatgtaatgtctattctacatagcaaaagaaatagtctttcagaagagaactgactgggaggcgggcatgtggctcatgactgtaatcccagcattttgagaagccgaggtgggtggatcacttgagctcaagagtttgagaccagcctggcaaacatggtgaaaccccatctctactaaaaatacaaaaattagctgggcctggtggcgcatgcctgtaatcccagctactggggaggttgaggcaggaaaatcacttgaaccccgaagccggaggttgcagtgagtggaggtggtgctgttgcagtgagctgagaatgtgccactgtactccagcctgggcaacagagaaagactctgtctcagaaaaaaaaaaaaaaaatgtggcagaagagaactgactggaaccacatgctccagttctagatgatgcctgaatttgtaaagagactaaaaatgtgttccagattatatttttcgtgacaggtttttttctttttaatttaatatttaaaattctaaacttttaatttagttgactctcttgattttgttgtgtggggattgttgtgtagagctgtaaattcatggtcacagttataaagttaggtagataagtcataaaaaatattaagaaattaaaaccctcagtgaatctctattatattctgcatttttttttgttaacatcagccggttcctagtggatttattgattttatttcatgtaataactagggaaacatgtattcctgaaaaaaattaaataatgtttaaaagctatttattgatatagttcatttagcatcatatgcatgatcttttatagtccattcctccgtagatactacatcatagagcaaccagccttcttggctagtatatttttcttgataacttggtttcaatttttttttcgtcctttatgtgtggatatttgcatattcctatttctacttccatctttgtattagaaatgacttcagatataaagaaactatggccagagctataaggatttttgccttttgaaggtaataccttgatatcatgacattttctatgattttaagctttttagtttttatcattttatataaagtattaatcatttctgtttatttgctggttcttggattactccaaaaatatctaatatagaccttttgaggcattgctattgttgtttacttgtttctaagcaagcccattttctctagtatttattttttattagttatttgttaaataactaataaaactgttatttattatttattagtttgtctttcctccaaggacatgaacatgtctttaatattttctcctgttcttttttcagttgcattaacttgtcttatttgacttctcttacctttctttctgcaaagtgtagctgatttctgcattcacgtctcataatttgttactttggagtgaaagtcctgtttgccttcagctcttagcaaaatctgtctttcattaccctatttgtattgccacttcttggtgctttaaaattcttctacactgttccccattgctgacacagttcctctcctcagcagaaattttactccactctctgtaaaatatctgtctcaacaaagaagaggtaaacgttttaaatcttgaagctcaatatggtattctttgacatcagtctcttctatgttaagttttgatatcttatagcaacatttaaatgactttcttattgttctcatcttctcaatcaatattttcttgtcagtcagatttaaattagcaagattagatttcatatattcttgaaggcaggatatcacaaaacaatttagcaagctgtttgcaatcaatattatttatatattcacacactagagattacatagggacaaatataacaggaatatggcccaaatcatctagatttagagccctttaatcaacatttagaattatttacttctgtgggtagaagaaattatcgatatttactaaatgttattaactttttaatcactgttacgcctttagcaaataaatttatttatgtattgggtgattagaaatgactagctacaaacagatatgtagaaaagggacattaatactatacacatacacacacacacacacacacatgcaaagactaatagtgacagatacatgtacatagagagatatacacatatcatactttatggaatgctatattccatatttcatctgcataagtcactgatatactttaagttaaatcatgacaaaatgaattgtatggtttgaaagttccagaatgcaccattaaaaaggaggaatcagagtgtgtattcattggaattcttattttaaagattaattattaatgaatcaagtaatttcaaagtaatattaatcctttttaggaaaatttgagtgggctgactttctttaatatctttgaagccagggaattcagttttttaacatagggaaaattttgtattcatcatcaattttggagcttccaatctttccctggtacttgctagttataggggctcacagataactaagatggttgtatctttttagtccatttcattttgaagaatgtgtgactattgcttttcatgacactgtgtctcatttatttttaattttttcaaataatgacaatctagatgaactttttgggattagtgggtgtttaaatttgttttaagaggggcaatgctacatgttgcctatcagcaatccagaattttttacatgtctaatcactttacagccactatggaaggtgctttgggatctagagccaactatctgagctataattcctattcacacattgctgagttgcagtagggagggttaactaagagagcttccttaatgctttatagaaaaaagcagaatataaataggtttattcagaggataaaagattaccaaatgaatgttagagatgtaggaagcaaggcaagaacattctggattgactgataataaacaatgtatgtgagagcaaataatgtaagagcaaaacatttgtttgactttgagtgatggcaaagattggaatatatggctaggagtttaaaagtttagtcaaatggatttagtggtcagtgagaaggtctgaagaaccaattccatacagaggtagcaaatcccagaagagtaacagtgtccaaatggagaaattgttaaatctaagcagcagcaaaaggctgggttcagcattggaggaaagacgagatggccatgccagccaaggtaaagtcgttccagccaagttatcccagactaaaaccaggagaaaacagaagtaagatttagttctaagggacaggattgtagggaacagttatgacccctgttatatataaagtatggactggggaccttctagttcacagacatttttgccaaattggtaaaagttctcttataaaatctttaactctaggaaaatataattctcaaacacatgagggtaaattcttctgttctataagatgatggacatagaaattatgggaagccaaggccaggtatggtggctcatgcctgtaatcccagcactttgggaggccgagataggcagatcacttgaggtcagagctcgagatcagcctgggcaacatggtgaaaccccgtctctactaaaaatacaaaaatcagccacgcaagttggcgaatgcctgtaatcccagctcttgggaggctgaggcaggagaataacttgaacccaggaggcggaggttgcagtgagccgagatcgcgccactgcactccagcctgggcgacagactaagactctgtctcaaaaaatgaaataaaataaaataaaataaattctgggaacccaaaagagatgggtagaataggaagattcaccttttaaaagtgcattctgagggaaaggaacgtgataacttgacagagatgtttgactgctcctccttctgaatcccctgctaaaaacttcagctgacagtttcagtctcacccagttcaagggcaaaggctactgggccagtggctcatcgacttattgtttccaggggagacgtaagacagtctggaggatgaggagttagtctggaaaagtgaagagggcctgctatagatacagaaactgatgggtagcatccatagttggagcacaggtgcagagggtgtgttcctctgacacagggcaacttgtggtggagtttgacttagaagtgagattgtttgggggatgaaaagggaaagatagatatgaaaagaaaatttccaaatagcaaatatattggtcttctgctgaaaatggctagaacggacatataaactctgagaaacaggaaattcaggaaaggagctaatggtagagagactagaggagcttagtttgggaaataataagtttgtgaggggtgataagaaagccgagaggcaagtccttttggcagttgcaagcaatgaaggagagaagtcaaacctggagatgcgtattttaagagcctatctcaaatgtgcagatcatactggttttcatatatgattttaaaaaaagttaagaaaacatacgttctttaaaatgcaataaggttgtataatattctctctggaccagtaattcacacagccatcacaacacaagtaaaacatgctaatatcttctggtaaactacctttcacaattcaattagataggtattgtaccagctccatttcttaatgtgttcgtttatctcaaatgcaacagtgtggtaggattgtatgtgcctggagaccctgagcatagaaacaggggagaagagaaatgcattaataagtacaaggcttaaactaaatataaagaatttcaatatcacgaacatataatagctttaatcatgcttgttctcaaacattatttatggcagtggtttatgtgattttacttaattaaaaattaggtaaactgatttttaaaaatgtatatataaagaaagcaagctattatttctttgaaaactgagcttttgctttggcaagtcttgataaaagtaagtctctaagaagtatttccattgcataaagtatggacaatacaaatgtaaaagactacacaaattataaaaattcagatgtctgtactgaaatttttttctctagtgactaaattctccattcatttaaaaatatattaaattcaaaattattgatggggcagtttatacacaaaaagcaatagcaataaaattatgcttgatgggcacacaggtaaagaaaactttaactatataaatatacacatatatacatatgtctacattaataacattatttattatagtctccattgtaataattggctgaccaatcagcagacttgctgtgttataaggatatatcagctgatgtaatagataaaaccccagcttcttagaggttcagagcttgttcagattacaatccacgcagtatgccttggacagttttttactccctgattcaaagactgaagttctttccatcttgtagctccaccaatagcaacttccacagttgctattgaagtattagttcacacatggggaaattttatggtctggacctggagcagacccatatatactccactcttcagtgcccagccacatggccataccttgctcaggtgaatctgggcaatgtcatctctctgtgtccctcatgagagccagataacacacgtaggataactttggttgtatgtacaaactctgagccaggcactgtggagagcacttctacaaccagtatacattttctaccctctagattcttagtagttacggaacagaactttccgtaagtcagtgttaatgcaaggctggatttattagcttatacagtagagggataaagactttctcataaggagaaactttttgcaaggggcagtattggaacagagcttgaagcataggcagggactcgtcatcagcagagatagaggctacagcatgaaaagtgacatgacaacaggaaactataaaatggccagagatgagattctatgataggggcagagataaagatatctgaaagatatttgtggactatcacatgacaggccttaagcaccctatttatagttcaggagtcacttcaaaatcttcagcaaatgcttgagaaagaaagcagtgttcagaacaagtagaatggaaagaaattaggaatgggagtagtgcagagcagcttgaactaatgcactgggaatggaaatgagagaacaggcaaaacatttgagaaagtcgatttgaaaaggcagattgtttatgttggtgagtaatccagagattttgtatttcactgacagagtgttctcaatcgttaatccttgggaattatttgatgagttccaaagggcactaacagctaacagtcgatctcattaactaaggatctgttaaaacctgccaaggcaagaattttttctgggtttgacaatgacgtctctgaaagccttgaacttgaagagaagcacagtaaaaatatcttctgttatagccacaagttaccacattttgcaaaacaaaactgaataataaattatataggatagaccatgcccccacctttttaaaaactcattaaaaagtcttttttatctttgtttttccttaaccaaaattatatggctctaatcttcattctacattctcttctagagttatggtcagggtatagatattttttgaaatgatactgaaaggtaacatttcagagagtttgaaggcattatgagtcttgattctgctagacttcagtgaaggaaaaggtaatattggagttcttcttcaatggcacctgtaagtctcatctgcataatcaagaatactgtattcacaccataaagggcactcttgaaatagggttttgagggccattcttttctcatttttatgatgcaggggaagtatttaaacgtttgaggagtaaaatagcctcttctattcccattagacgtagctgcaatttaccacaatgtaaaacatcaaatagtgttgatgtagaatatgtgaagtctcattttcaggtatttgacttaagaatatttttcactggcaactgagactgttagtcctccaagaagatagcctaagtcttgccaagttcaaaatgaaagatcctcctcaactccgtcagagaaggggtaacaaagtttagatgacagccatagagtcataattaacatgtaacttttagattgataatttaaattattccaactttcagaaaaattgtcttactaccctcaaacatattatgtgctatgtataattgttaagcttagaatggcaattggaaatatagtgtggtagcagaattcaagtggaagtgcattaattgtaataaaaaattgtatctaatcatgtggtttcctgttataatgggtagtagtatttatgtgctctttaaacactttgatctaaggtgtaggtttcctttcaataatggatacattccaaaaatatttaaaagggaagaaaaagacatattaaacgtgtttgaaatttacttttattatttcctactcgttgatggtattgagagagtgaagaaaattttgattaagcaagaggaaaaaggactaagttaccagaaaatatgggttttagcttagtttccctccttattggccatgaaacttgtctgagtttttagtttttatccacataaccattctatccacttcacagagttattttgagggccaaattattacatgttttacatacacaaacagtgtataaaatcatttcccttctgaggtcactctagtatttttataacatcatggcttaactccactgacataaatcccatggcctattgttgcgactttctgatcactcatgagtctgtagaggagtcttggtcctcagcctaccgatgagtctgtagaggtgtcttggtcctcagcctaccagtctcggcttttaacacctgggagaatgatacaattccagcaattcagtaaggtaaaatattagggcaatgactgagataaaaaaaaaaagaaagaatataagttttaccctataattggttgctgccaaaggattatttttctacattgcaattcttattacatcacaccactctacttaaaattatctgttaatgttttttcaagtctcttggtttttgattttggcatttcttcaaatctatctcatgtactagaatctgtgatttgagaatttaggctgaaaatgtgtaagaatcaggtgctcttgttaaattttgttgagttggaataaaaccacaacagaatacttttgagtttttaaaaaataaactcccactgatttttaaatagtatgcacttggagggaaaatttttattttgttttgctatgcctcatcaccatttcttttgctctgcaggacagtactacagaaggactaagtatataggaaacttgacttatttaaataaggcagtgaaaaaaatagaatatggggagtaaaacaacctctgaagctaagtctgcatatataataactgggtaagtctttcagtgagtttattgattagtaacaggggtttgatacgtaaaacagagcaaattgcatataggtatgatttgaatgggctaacatacttacaattaatataaaatatttccagattaagaattataagcacacattaaaataagaataaagaaactttttcaggtgtcttgaagaccctgaaggatttagtgagtcatcagtgagacatattaataaggatgagtatatgtatgagtacctgttgggtttgttttcctatcgttttttcactctaagtagtagcatgtattttcttttttctttttgaaatggaggtttgctcttgttgcccaggctggagtgcaatggcatgatctcagctcaccgcaacctccgcctcccacgttcaagtgactctcttacctcagcttcccaagtagctgggattacggccatgcggcattacgccgagctgattttgtattttttttagtagagacaggttttctccatgttggccaggctggtctcaaacttccgacctcaggtgatccacctgcctcggtctcccaaagtgctggaattacaggctgagccaccgcacctggcaggtaggatgtattctctagttcttttacaaaaggaggattttcatttacctgcactttttgttccccaaagagggagtcctggagtctcttggtgtgtatagaaaggcttaaatattttagccagtcctttgtaactttttccttgcttgtcaaaagcaataatattgccatcattgagaaatggtttcaatgatggcgacacttcacagataagaacaagcttattaatcttgggaaactcacaaatgattattgagtctcctagattgctaaaaacaaagaagaattaattttttgtcctgaagatttaaggtaattgtccacagcttaataatcatcaggaagaggataaactcaatcacaggaaatacaacgtagtagtgaaatttgttcaattacagaggaaagttccatcggaaatggtggaaatcctggcacttggaataagcaaaaccaaacaggacaaagtactaaactacaattagtaaggttctaatacagctctaaaaaggaatgcttcctatattgatgataattagttgatgatagattactgagctgaaaacttgacatttgattgctacttttaagtgttaggcaaattaagaggtatggaaaattggacatatcatagtgtaaatgaatttattttctccatggcaggatttggttgcttgtgaacatatagcagattctctaatactcataaggctccctctttcctttaatacgaaggatgtaggagaagttcagcaagcacttatttgttaggttgaattctaaatatggacacagtgcagtcttaaattatgttagaaaaaggacatttggcttagtgagacacattaatcatagtgcagtcttaaatagatctgaggacttacaacagtgcatagatatgtctttaaatcagcagaaattcagaagaacatggcaggttagaaatgataggatgataacttggatttgattatggcaagattaactaagcagctgttgagattggataatgatatgtgaggttctcatcaccctgtaacttgtttccactaatacagattaagaatgtctggaggaactataattatctctgtggctcgtgcataacataattatgttttgccagtgcaaagcattttattaagtggaaaatgatttttaaaaagttatacaagtggctacaagaacaaatcaactaagaacagaaacattggcacttcataatagtaatgtgaaaaatacttatctctttttgttatatggagttttcagaatttaaagccttgtttatatgacagatacatgagggattatttcagtgatgttgaccctcttactgaagtttgtgccccaggtgtccagaccacaaaatagaaaatgcaatctttgtctgccttacataaatacagtactgagatcagcttgtcttttaaatgtctgattgctatttaattacaaaaaatttgtctttaaacagagcacccaaaacaacaaaaaaacagtaaagaactcatttcggagccttgtaatccaccctaccacataaaaagagggtgatatgtctgacaactctctgtataatcaggtttattaagtgatagtcattatgcattttataaacactaccctaaaatatgtaatgtgaatgtatctgttaatcagaaaaagctaactaaaactgaatgcaatgtactcatttccattctggtggcattcttacataatgattttaaagcaactgtgatgagatagaaagagtgttaaagctgtagtgaacaaatgggaattcaaattccagctctgaagtgttccggctggctgagtttcttatactttctgagcctccgtttatccagtagtaaaatgcagctatgaatttctaccccagtgggctgctgagagaattaaatgagataatttatgtgaacaatcttcttagaatatgtttatttaatctgaccttgaaaaataattcacaaaaaatgtgtcagagtaagttttctctcgtctcaaaggagagaatatgaagtagattaagtgacatttttgaaaaaagttccacatttgaaacttttatttataaaattgtgaatttatctttagttatagaataactttcctcttcctttgatctttttaagcgtaatatttagccctctctttattactctgagagaagatgaatattttaaaactatttatatcacatgtctaaaagtatttctcatttttttcttaagctcttttttgaatatttataatttctttcccttttattctcatatttcacacctagtatttctgctttcatttcattaatctttttttaataacttggcacctgggcctgttttgcagctatgtgcagcaatcttaagtactatgtatagtttagttttcaatcagttccttgctgttactttctgcaaataaaaactagcttagctatgcatgtgattaacatggcccaggtattcctattactaggtctttctattactaggtctttctttccttctgtgttatttaatataaggcaaaataggaccctgccgcttaccaagctttcaggatcctccatcttccatcttccactaatcccttcctatgtctctatgaaaaatatatctctaagatggtggttgacaagagtgtgagagtcaaatggtaaggaatattgcttggaaataaggctgaattaataattccagagaaacattgtgaaataacttataggtacataaattcactatatttagatctgcctcatacttttaaaccagcagcatgataattcatagcatggacttatcatcataccatatattgaaacattcctctattgttggatggttatttcatttcctctgcttcattgttttgaacatccctataataatcaccactgtatatgccattttttgcagaagtggaattcctagttaaaagttgaatttcaaaattgttcttgacagtttatacttctagcaacaaagtctctaagtcttactattaagagaaaatgcaagacttagaacaatacattttataaatgacatgtatattaaaaaagatctattatgtgaatgtatcatataacttgaatgatatacactaaacacttaacctctggggaggaaaataaaattaagaaaaggtggggaaggaaaatttacttcaaatacatttgtattgttcagattttttacaggaaagatgagtttatatactgctatgtgtgtatatatatatataacatatatatatctatatatatatatagatatatatagataaattttttttttttttttttttttttttttttttttttttttttttttttttttggagacggagtctcactctgtcgcccagactggagtgcagtggcgcaatctcggctcactgcaagctcctcctctcaggttcatgccattctcctgcctcagcctcccgagtagccgggactacaggcgcccgccaccacgcctggctaatttttttttgtatttttagtagagatggggtttcactgtgttagccagggtggtctcgatctccagacctcatgatccacccgccttggcctcccaaagtgctgggattacagatgtgagccaccgtgcccagcctactgctatgtatttttaaaataaaattaaaatagagacacaaaggtattactatagtggtatcaaagtaaacagtgtgaaagcatccaacctgaatttcatagctgcagtgtgatggcatttttattcagctatttctaggcatattttaaggtctgagactcaccatatgcactatcatgtaaatttatttttataggtaaaaactgtaaagtaataaaacagtctcagtttccagagcaaatcatatccatctgtactgctgggtaaatgtagttctgattcaaccacatgaataagattacacgtgtttttgaaaatcactatttgctgaagatcataagcaattcacatgctttgtctatggttaattttggtaataagatgcaagacagctcacagatctttaagctatatctagaaatagtgctgattgaatttaagctgattatgcagcttattttggtcgtttgccctcttcctaaattctaaagttcaaagtttaacgtgaaatagttttctcaagtttagctctagccaaagtccatgaaatggcttatgtctgtcaatagttgacctaatagatttgtcctatgttgacactttgttcttttcatactagactgtgcgtatcatgtaggtatgttattttcagtgtgctgtgctttaaaatgggattagaaagtcatggagaattttttgaaaatgttttgatgtgttagtgttttttggtagggttttgggatacatcatttatttattaattaattcattattctgtatttattctagaatgtcatcagtaatgtattgaactaccaatcatgttagtggagataacaaggcaagaccagtatagtgacattagaggcataaaatcaatgggttctataaaatatttgagttgctttataagaactgtgtatcaacaggagtaaagtcatcaagaagaacctcttctaccagtgccatcaagaaagggttcatttatatggggaagctccaacagaatctggatagacagaaataggattctttttcacaggcagggatggagatatgttttagacatggaacatttgagaggataaaagaagcatgaaaccacatgtctggtacctgtgactactaaggcatgtaaataaggcatgctgagagatgagaatgaaggtaaggtggtaaagcaggggtaagattttggaaaccattaaaaaccatgccaaagttcatgaacattttcctttaggcagtgaagatcttttaaggggttttcagcaggagagcaacagagctgtacattttagaaagagccctctggcagaaatgcaggggatgaatggggaatgcacaataagaggcgttaaatgattccttctggtaatattgggacataaaataaagcctgaatggtggggatagagaggaaaggatttgatgcagtatatgttaaggaagtagtagggtgtgtgtgtgtgtgtgtgtgtgtgtgtgtgttttctttctttctttctttttttttttttttttgacagtttcactgtgttacccaagctggagtgcaatggcacaatctcagctcactacaagctccacctcccaggttcaagcaattctcctgcctcagcctccagagtagctgggattacaggtacatgccaccatgcctggctaatttttgtatttttagtagagacggggtttcaccatgttggtcaggctggtctcgaactcccggcctcaggtgatccacctgcctgagccttccaatgtgtcgggattacaggcgtgagccaccacccctggccagaagtagtattaacaagtcaaagtcaatgataaaatttggatgatgtggaagaggcagtagattcccaagcatctgtcttgggttaatgggtagatggtgatgctgttcaccaataggaataggaaaagaggtttgggaggcaagagtgagaagtggttagtgttcagtgtttagctatgttttgtttggagtgtttatgtggcagccaggtggagattccaagtatgcagttcaatatgtgggcccaaaggttagaacacagggacgaattagagatgtagatttgttggtcattgacgtttcataaatgtagtgttaatatcgcacaaagcaaaatgtttagaggaggaagaataacattaggaatagcaacctgccatatatatatatatatatatatatatatatatatatatgacttaccaacataatccatagggtgtcacaattaggagtttattagggacgtttgtgagaccagtctcagtaacatagtggaagtataagtggagcacccactcagtgcatagtagaataaaatacaaatgaaagagttaaaatgaacaggttcatgttcttttttgaggagcttagctatgtaggggaggggaggacattaactggaggaattcacagggtagagggatgcattaattaattagacaagagacacaaaggcattactaatagtctatgggaaaataactggtggagtgagagactgaaaatgtagaagagataggaattactcacaaggcacagatacagcaactctcaacacaatgcagcagaaaaagggcaaactggctattcttattattgagaaaattgtggatgataaaatagaaattatggtatatgaaaggacagcctattaaccacttatatagcaatgttttaaacctgcataggtaaaacggccgaaatggtagtctttcttccaaatctctttccctccaccatatgctagacacacccttttaataaacagcaccacagtctaccttgttgcttcagctgaagacctgagttgtccttgattctcttttccacagtttattctccagacatctcaacttcctatgttcctgtcaatttctactactgcattctaattgaaagtatagttacgttatccccagactacaagagtagcctaacttttctctctgcttatctagagccactccagccccactcttccatctgttctccacttaccagccacaataatatcataaaaaagtaaaccaagtcatgtcactctctggttcaaactcttcaataatgcatagtgggcatgtggtaaattatgactattataatcataattagaattttcctttctctttctctttctcttttggttttctctttaccttcatttaactctataatagcaaagacatttaaaaattggccaatctattctaaacatatgattactggtagatttatagaaaacatattcagcactaatgtgacttatttctgtcataaacatttgactccttgctgttgccttatttgaaaatgacaaatgacaaataagtaaaacggtgtttctgttacttgtgttttatttgacccctcaattcccagtaataagtaagataatactttaaacaatctttgacatttttttctaattagatgacaagcaatctcaatgcatgcaccacgtgtttcaaggatataaattagagtgaatactttaaaaaaatagaataaaagcgggacacactgatatttgacatttttgaaaatctcgaatctcacatccctgatttttataatgacagtgattaggaaaaaaaagcttaatgtaagacaataagctctgagatttttcttagaaatgtactaaatttgattctaggaggagaaggcacttgagaagagcctgttgaagtctcatctgctggagaaaatttactccaagaaaataggatgaaagtgtcaaagacaatagttacaagccttggtggtgcaattgattatgatcttgtaatggtataattctgaaacgatgacacagatagtgtctttatatgatggagctggtccctagaagcagaaggcacagttttcaagttcagaaatttctaattaatatcatgtatatggtgaattacatatatatgtaataatatgtaatataaggttctgtaatatatgtaaggagttttattttatgatatataccataaaatgttccttatgtcctaagtgtatgacaaagaataaaacacttcatatcatagctatgacgttgtggaaaagacacagaactagtagtaaaggagcatgaaccagattccattctatcaatcaccgactatgtgcctgggtttgtctcctctttaaaacatagagaatgcttctcctcaggcgttctctgatgggtccattctatgagctgattctttttggtgaaatcagtcactaattcagtatcctgaatgccatattaaggaggtttagagaaaatctgaaaggtaactatgctaaaacagaggcatttctaagtgaatcaagttggtagtcacattcagaggctttggactcggtcacaaggaagcctaaccaataatcacttcacactgagtaaccattctacatatctttctgttgttataattttaggaacaactgtaattttaggcaaaacttggcaacttggccttatgtttagtaaattattttgggctctttgttttccagatttcaactgatgtttttatagtgacaaaaccatcccaatttgcctcatgtgaaagtcattctaaaataattgatatccaaagtcattaagataatgcaactaaacaggaatgtagttacttatatcttattggtagggagcataaaaatgtaggcacgagaaaggtgttttagtgatctaaagatccaatctgttatttttaaacgatgccattctattttgcaaatgcctactataagcagaacagctgaactcactgccaaatatgaaagagtagttaagaaatgatttgcagaatggatctcaaggtctttattttgctcttgcgtgtggaatctatttgctcatttgcacgtgtggaaattttaatctctacagcatgtttttaagcgtcacactgagcctggaagttaacacagaatcagatcagtaagtaaataaagcatatctttgaaaacatgaaatggaaaaaaaatacttgttttttgaaagttttatctttgcacaaaatgtctatctacatgtcaaagatattcagatgttcagctaagcactttgtaggtcaaaaaatatattttttgcattctgaactcttggcatcttggttaaactttcattctatattaattatacggatggaagagtttattcaatactttaatgaaccaagattattagaattaagcttcatgaaatcaggttctttgtctatcatgttcattactgattccccagtgctcagttagatgcttggaatatattacagctttaataaatatatttcaaaataatgccatggaaagaggcataaaataaagctttgagacttagcctggccatagcactgcttctaagcttagatcttagccaagccatttctctttccttgagtttcattttcctcatcttctaaaaataaggatttttttaaattgatgagagttctctggtcttataaaagtacttgacaattattataccatgtctgaaataacgtgctaatcacaatcttaaaataaatatatttccagaggtgatataattgccaaacatacaaattagctcacctagtatatagactcaaaaagttcagaatgtagatttcctctgatcacacttgaagattatagtgcaattttctcctacagaaagtttgtgaagtaccattaaaaattatgagtgtaggttgtggggaagatagccaaataggaacacctctggtttgcagctcccagctagatcaacacagaaggcgggtgttttcttcatttccaactgacatacctggctcatctcattgggactgattagagagtgggtgcagcctatggagggcgaaacaaagcagagtggggcgttgtcttaccaaggaagcacaaaaggtcgggaactccctcccctagccaagggaagccgtgagggactgtgccgtgaggaatgatgcattctggcccacatacccacagaccaggagactccttcaggtgcctataccaccagggccttgtgcttcaaacatgaaactgggcggctggttgggcagacactgagctagctgcaggagttttttttcatgccccagtggtgtctgaaatgctagcaaagagaactgttcactcccctggaaagggggctgaagccagggaaccaagttgccttgctcagcagatcccactccacaaagcccagcaagctaagatctactggcttgaaattctcgctgccagcacagcagtctgaagtcgacctgggacactcaagcttggtggaaggaggggcatctgctcctactgaggcttgagtaggcagttttctcctcacagtgtaaacaaagccacagggaagcttgaactgggcggaacctactgcagctgggtaaagccactgtagccagactgcctctctacattcttcctctctgggcagggcatctttgaaagaaaggcagcagccacagtcaggggcttatagataaaattcccatctccctgggacagagcacctgggggaaggggcggctgtgggcgcagcttcaaaagacttaaacgttccttcctgccagctctgaagagaggagaggatctcttaacacagcactcaagctctgctaagggacagacttcctcctcaagtgggtccctgatctccatgcctcttgactgggagacacctcccaccaggggtcgacagatacctcatacaggagagctccagctggcatctggcaggtgaccctctgggacgaaacttccagaggaaggagcagacagtaatctttgctgttctgcagcctccactggtgataccaaggcaaatagggtctggggtggacctctagcaaactccagcagacctacagcagaggggcctgactgttggaaggaaaactaacatacagaaaggaatagcatcaaaatcaacaaaaaggacgtccacacccaaacaccatttaaagatcaccaacatcaaagaccaaaggtagataaatccacgaaggtgaggaaaatccagcacgaaaaggctgaaaatgctaaaaaccagaacgcctcttctcctccaaaggatcataacttctcatcagcaagggaacaaaactgcacaaaactggatgagtttgatgaattgacagaggtaggcttcagaaggtggctgataacaaactgctccgaaataaaggagcatgttctaacccaacgcaaggaagctaagaaccttgaaaaaaggttaaatgaattgctaactagaataaccagtttagagaagaacataagtgacctcatggagctgaaaaacagcacaagaacttcgtgaagcatacacaagtatcaatagctgaatcgactgagtggaaaaaagaatatcagagattgaagatcgacttaatgaaataaagcaggaagacaagattagagtaaaaagaatgaaaaggaatgaacaaagcctccaagaaatatggaactatgtgaaaagaccaaacctacgtttgattgacgtacctgaaagtgacagggagaatggaaccaagttggaaaaaactcttcagtatattatccaggagaactttccccacctagcaagacaggccaacattcaaactgaggaaatacagaaaacaccactaagatactcctcgaaaagagcaaccccaagacacataatcatccgattcacaaaggttgaaatgaaggagaaaatgttaagggcagccagagaaaaaggtcaagttacccacaaagggaagcacgtcagactaacagcgggtctctctgcagaaaccctacaagccagaagagagtgggtgccgatatctgaccttcttaaagaaaggaattttcaacccagagtttcatatccagccaaacgaagcttcataagcgaaggagaaataaaattctttaaagacaagcaaatgctgagagattttgtcatcaccaggcctgccttggaagagctcctgaaggaagcactaaatatggaaaggaaaaactggtaccagcaactgcaaaaacataccaaattgtaaagacaattgatactatgaagaaactgcatcaactaatgggcataaaaaccagccagcatcataatgacaggatcaaaatcacacataacaatattaaccttaaatgtaaatgggctaaatgccccaattaaaagacacagactggcaaattggataaaaagtaaagacccattggtgtgctgtattgaggagacacatctcacgtgcaaagacacacaggggctcaaaataaatggatggaggaatatttaccaaacaaatggaaagcaaaaaaaaaaaaaaaaaaaaagggttgcaatcctagtctctgataaaacagactttaaaccaacaaagacaaaaaaagacaaagaaggacattacataatggtaaagggatcaatgcaacaagacaagctaactatcctaaatatataagcacccaatacaggagcacccagattcataaaggaagtttttagagacccacaaggagacttttactccaacacaataatagtgggagactttaacacccactgtcaatattagacagatcaacgagacagaaaattaacaaggacattcaagccttgaactcagctctggaccaagcaaacctaatagacatttacagaagtctctactccaaatcagtagaatatacattttctcagcacattgcacttattctaaaattgaccacataattggaagtaaaacactcctcagcaaatgcaaaagaatgaaaatcaaaacaaacagtctctcagtccacaacacaatcaaattagaactcaggattaagaaactcactcaaaactgcacaactacatggaaactgagcaaccttctcaatgactactgtgtaaataatgaaattaaggcagaaatacataagctttttgaaaccaatgagaacaaagacacaatgtaccagaatctctgggacacagctaaagcagtgtttacagggaaatttatagcactaaatgcccacaggggaaagcaggaaagatctaaaatcaacaccctaacatcacaattaaaagaactagagaagcaagagcaaacaaattcaaaagctagaagaagacaagaaataactaagatcagagcagaactgaagaagatagagacacgaaaaagccttaaaaaatcaataaacacacgagctggtgttttgaaaagattaataaaatagtagacccctagccagagtaataaagaagaaaagagagaagaatcagatagacacaataaaaaatgataaaggagatatcatcattgaccccacaggaatacaaactaccatcagagaatactataaacacctttacgtaaataaactagaaaatctagaaaaaatggataaattcctggacacatacaccctctcaagactaaaccaggaagaagtcaaatcactgaatagaccaataacaagctctgaaagtgaggcagtaattaataccctaccaaccaaaagagcccaggaccagaaggattcacagccaaattctaccagaggtacaaagaggagctggttccatcccttctgaaactatttcaaacaatagaaaaagagggactcttccctaactcattttatgaggtcagcatcatcctgataacaaaacctggcagagacacaacaaaaagaaaagaaaatttcaggccaatatccctgatgaacatcgatgcaaaaatccttaataaaatactgccaaaccgaatccagcagcacatcaaaaagctcatccaccacaatcaagttggcttcatccttggcatacaaggctggttcaacatatgcaaatcaatgatgaaaaacacatgattatgtcaacagatgcagaaaaggcctttgataaaattcaacaccccttcatgctaaaaactctcaataaactaggtagtgatggaacatatctcaaaaaaataagagctatttgtgacaaacccacagctaatatactgaatgggtcaaagctggaagcattccctttgaaaactggcacaagacaaggatgccctcgtgctcaaaataatattggaagttctgggcagagcaatcaggccagagaaagaaatgaaggatattcaaataggaagagaggaagtcaaattgtccctgtttgcagatgacatgattgtatatttagaataactcatcgtctcagtacaaagtctccttaagcaaataaacaacttcagcaaagtgtcaggatacaaaatccatgtgcaaaaattacaagcattcctatacaccaataatagacaaacacagagccaaattatgcatgaactcccattcacaattgctacaaaaggaataaaatacctaggagtccaacttacaagggatgtgaaggacctcttcaaggagaactacaaaccactgttcaaggaagtaagagaggacacaaacaaatggaaaaacattccatgctcatggataggaagacccaatatcatggaaatggccatacagcccaaagtaatttatagattcgatgctattcctatcaagctaccattgactttcttcgcagaattagaaaaaaaactactttaaatttcatatggaacccaaaaggagcctgcatagcccagccaatcctaagcaaaaagaacaaagctggaggcatcaccctacctggcttcaaaatatactacaaggctacaataaccaaaacagcatggtactggtaccaaatagaccaatggaacaggacagaggcctcagaaataatgccacccatctacaaccatctgatctttgacaaacctgacaaaaacgagcagtggggaaaggattccctatttaataaatggtgttgggaaaaccagctagccctatgcagaaaactgaaactggaccccttccttacaccttgtacaaaaattaactcaagatggattaaggacttaaacataagacctaaaaccataaaaaccttagaagaaaacctaggcaataccattcaggacataggcatgggtaaagacttcatgactaaaacaccaaatgtaatagcaataaaagcctaaattgacaattgggatctcattaaactaaagagcttctgcacagcaaaagaaactatcttcagagtgaacaggcaacgtacaaaatgggagaaaatttttgcaatctatccatctgacagagggctaatatccagaatctacaaagaatttaaacaaatttgcaagaaaaaaaaacaaccccattaaaaagtgggtgaagaatatgaacagacacttctcaaaagaagacatttatgcagccaacaaacatatggaaaaaacctcatcatcactggtcattagagaaatgcaaattaaaaccacaatgagataccatctcatgccagttagaatggtgatcattgaaatgtcaggaaacagcagatgctggaaaggatgtggagaaataggaatgcttttacactgttggtgagagtgtaaattaggtcaaccattgtggaagacagtgtggcgattcctgaaggatctagaaccagaaataccatttcacccagcaatcccattactgggtatattcctgaaggattataaaacattctactataaagacacatccacaagtatgtttattgcagcactgttcacaatagcaaagtcatggaaccaacccaaatgcccatcaatgatagactggataaagtaaatgtggcgcatatacaccatggaatactatgcagccataaaaaaggatgagttcatgtcctttgcagggacatggatgaatctagaaaccatcattctcagcagactaacacaggaatagaaaaccaaacaccacatgttctcactcgtaagtgggagtggaacaatgagaacacatggacacagggaaggggacatcacacaccggggcctgttggggcgtgggggggctaggggagggatagcattaggagaaataaatgtacataggtttcacaaaccactatggcacatgtacacctgtgtaataaacctgcacgttctgcacatgtatcccagaacttaaaatataataaaaaaaattatgagcataatggtacagtctctctattttgtttaaggggagtatcaagtcagagtttagagtgaattatttcttttaactgcacagtgtgattcgtgaaggtcagagttgaggttcagtgcagtcaggctggaaaggtagctcctggcaataagaagagtgtgtgaataaataaaagacgtgagctgtttcctaagtttacttaatattcagattaaatgaaaattatgagcctgaatgtaggagtctggaatgaatatgagtcaaagatcacatggaattaatgtattataaaatgatatacaagataggtttaattaatcttcctcaatcattcttatttttcagatcttcaggaattttactgggataattatccaaataaattgcaagcattctatccaaatggtaagcagaacatcttattatgtaatcatatttgtttatccataattaatataactttctgagtattgaaatgagaaacttgatttactcttcttcactcatgttttaatttttttataagaaaaactagaatcactaaagaatttctttttattttatttaaaaattataatcctgagatgcaaatatatgccatgtaagcctgggaactatttaatcactttactctaaaatctggtaaaaggtaaaatttctgaaaataggtgactggcaaacattttgtaaacaatatataagaagaattgtatatcaaaatatacacataaaactatcttttcagataattatgtatcatttattttcttatagcgaaattataaaaatacaacctatagccttccatagatacataattaactatgttttgaaatgatatccaattcagtaccctcatacatttgaaactttgataagctggtctatcttcactttggggatcttcttcattaagagtttgttttctcaagttttgaggtaggatacatgaagtcattcttcttctttataattatgtggcaggaactatctccctgaaaactttatgcttaagtttttgacaatcacactgtcagtcagatggtgcaaagtcttttaatactttttaatataagagagttgtctaaaatacagatagttctccatctgagctcatgacccaagcaatgtgcttcaaaattgcatttattgtatttttcttattacaaatgatactatgttcataatggatagataaattagatacacataaatacaattaaaaagcatattctcaccacctaatgtaacctgttaaccttttgtataaattggtgaatggtttcagtatatgaacacacaacctactgtaaaaattcaagaaatgagtgtgatgatgatgtaaaatgcaggttcaccttctctgtccccacttcctctgcagcttgggtataaatgcctgctccaccacctgttctctgtgtgaactttggcaaatcctttacactctctgggctgtcctttctcatctgcaaaatggagctaataatacatacctagctgaaggggttgtcttgaggatgaaatatgttaatacaagttaggtgtatagaacagtgcctagctcataagtgttagatattacaaaattacctattgtatttgaattattttttagaattcttaagatgtgcctattttgtatacttatatctcatttagctctttattaatggcaattattcttcagttagttattttgtggttccagatagaatatcatattttctaaaaacaataacaattttagatacttttatttttttcctttttagcatcatacttttttctattttgagttcactacttattgccttggctatgtctttcggtgcaacatgaaataactgaataattctttgttctttctgattttattaggaattactttcatgattataatttgagtactgtgttgactatttgtataagttttattctttttcttaagaagtaattatattcttaattaactatatttgatgatcagaagttcctgttgatattctataaatctcaattaaatataaattaatgttttaaaatctgttgagaagatgacttggttctcctctctaggtcagcagatttgctaatattatgttactcttgcatagctggaagcttacttttattacataccttagctcaattcctttttgtttacttgagaattctaaagaatattccaaagtaagaatgatatatactattttttattgcttgatatctatgtggtactattaaggacgttatatccacattgaacttcacaatattttctgtggagttacatatatgtaaaaattacaaataaaataaaaaccttactggtagaatattcagaccacagaatctattttggaggtgaaatttagaaaaaatgttttattaattgttctttgaattttgtaggaattctaccttcattgagttaatttctagtctgacatttaaaaagtattgctcattttgttaagtttttcattttactgccacatatttataaactatagtcttttggtttgcaaagttattgttgaataggtttgatagactcctcatcatttctaatttttatgtgtttttcttcatttttcactgatatttgtgtcagaagtttccctgttttatagcttctctcaaaaagccaaaagtggaattatgtacttgtttgatatatttatcttcctgatttattaattctgcttaatacctagtgtgtgtgtatatatatatatatatatgtatgtatgtatatacacacacacacacacacatatatatatatttatttatttattattttttttgagacgaggtcttgctctgtcgcccagattggagtgcagtggcgcaatctcagctcactacaaccttcgcctcccaggttcaagcaattctcatggtgcctcagcttccttggtagctgagactgcagatgtgtaccaccatgcctggctaatttttgtatttttagtagagatggggtcttgccatgttggccaggctagtctcaaactcctgacctcatgtgatctgctcaggttggtggatcaaagtgctgagattacagacatgagccatcatggctgtccaaaacctagtctatttctaatgccattttttaaattctgagatttatttctatgaaaatatttctaagtgtatcaggttgtatacaccagggtttgaatatgattgattttttaaatgttttggaaatatttgaaaacagtatgtaatccttgtcatagacttatttggatatagttctatcagttcagcacaattcatcataatattcaaatttcatgttcttatattctatttgctggacagagatgaggctagtttgtgcaaattcttaaaatgcccaagtgatccatttggatttatacagtaggcataaaactattgaatataagctggtgagttatatgagtagaccctatataggaagatgaatctttgggggtatgaaagatcaactacagtggcgtacaactaaggccaaatataagatttaaggatctgtttatttcagcatttctacttttaggaatctgaccttagaaatatcttccagtctttgaaggaagggtttagtgttcttaatctttcccaagccaattcccgccatcttctacttttccttcatccagtccatttcctccatcagctttccttctcagtccttttgtgaccttctgtgacatcaacttcttaaatgtaaaatataatgactttcttgtctcatgaattttatcccccacttttatttttagaaactttgatatagcttgtaaaagccaagacaaatttctaccagaattagagatatggcattcatccagccagccatcaaacatttttgaaaaccaactatctgctaggcaccatgctaagaggtagaaaaagctgcctccctacaagagatagaacctttaacctccatacgaaagagctcttaatcttttgcttgaattctccaaagttcagcatctccaactgacattaatatatttttgattcgatgacctgaagacaaccaaaactttaatgagctcagtctttatccctaacctacctctcctactatttcctctcctggttgatggctgatattaatctgtgctagaaacttaataggctgtcaatatataatctttatttaattaatattttatgctgtatctttactctgtcctatccttaaccaaacttcataaaagtcctattgatcacatctttacatgtatcccaaacttctctttacctctgtatttattacctcagttttaggaccacaacatatgctttttgattttttataaaccactaattatttttatatccctacctcttttgtccgtcagctacactcctaccagaatttgcatattatcatgacagtcacccattgaaaagtttttatgattttcgtttgcttagaggaaaaaaccaaaatcctcaggatgcattcagttttcttcacaacccagtaccaagtttatctcttctcaatttattccctttctccatctccatcatcctcattcccctgaatttcatcacatctaattaatgtgcatcatggcttcttcatacttagaccatgttctcacacatagtgggtattcaaccaatgtttgctggtcattattttgaaaaggcaaagggctagattaagcaggagcatatgatcaatcacctgagtgggtcagactgagaagacagtttagttgtttagttgataacttattggaactcttgaagttttatattagaataccatggaaatggaattcataaatacaacttagaaatgacctagtctaagctatgtttcctgaatgttgagacctgaagtatcagggacttgttcagaatgatagttgcagctgtttaatactatgagatttactgctcccgaatctgcggcaactgaggtaaacaatggtttgagtcctgagtaggaatttaagagacatgatgaactgtaactattattgatagaagtagattattctgacttgattccaaactgattgcatacatgtaatttacctccaagggtgtataattatgattttgcctgaggtatctatatggaagtatttatgaggatgcaattttcagggttttttttaaaagcatgtaattggatatttgatttgtaacctctaaaattaaggttagaaatagagtcatgagtgcttcatggaagacttcaaatggagagagagtgaattaatttagtagctgcttcatacaacttggctcaaatagagattgtagtctttctcctagtctttatcatatgaaaagcagccaggatagattttccttgttatatttttgtatagttgaaagttttgaatcaaattttaagtctttacaattgcctttttaaaattttaactgtttgttcttcgttacttctttctaaatgtcaaggtatatttatttactcttaataatgtgatatgtagtattccacaaacattgtcagtgacaaatcttttgaactaaagaatagattgtttgaccattccagtaattaaggaaactagattaaatatacaatggttgcactggtttttcaaacattgatgaagtaaacattattctcaattgacttagtagccagacattcttctcccaagtcttgaaaaataaaatattcaactttctgttcaattgagtggggagagctataaattttgtttcatagctttgtttatattgtctgcatttctctagattttatagttttagaacattataagccttagaaattcaaatgccgttttgcatttaaacttatgaaaaataatttaggcccacactgaagatctgtgaacacttttcttccaaagaggggtcgtactgtttaagtttgagaaacactgtatgaaactagtagcttaaaatatcccttttctaaatgttaagatggttcctattgtacaagggcaagtttctgaatatatagttataaagcctattgatatattgggtagtgtttttttttgtttttttgagtgcatctaacccaatgtccacattgtataaagtgccagagagattgaatgaattatcaagttcgtggactagtcagtgactgacaggacacaactatagtgataaatatatacaaataaacatgacaaagtcattcataataactttaattataacgagagagtcgggtctaatcaaattacatacaggaagagttaaaataactatctgaatattaaaagtaagataaaattttgcttgatgtaggctttctggaatatttaaataaacaaaattctgaaataccctctaataagtatttctctatagagaggtaattatatttaacagcaaaattaacattgatctatattcactgtgatatattttaaatattgttttgaaatactattgtatttatacaatgcaaaggaaagatcgctatttttattaaaagaatgttttcaaaaaatattttaaatttttatttcaaagtgacagttattcaaatgttgaatatgataagtgttttgtcatataacaatgttgtaaaatataaatgatttttatatataaatagaaatatgtcattcatcaagttatatgtaattggccacagctaactctaagtgggaagatttttttctcatcctattacttttttcctgagtatctcaagacataatgcttgtttctgtatttagacttttttagtttcccttgtattttagttagaattatctaattgctgctctcacacaaatgatgttatgtgactagagagaggaatcacgacttacctctttatctccctgtagccccctgtttctcaactttggctgcatgttagaaacactgcagaagattaacaaataatcatgtatgggtgataaatcttgattttactgatagctttacatgtatccacaacttctcaaattatacactttaaatatgtgcagtcttaaaaaaaaaaaaggaaaacatacacttatcatatgacccactaatccccctacttgggggtgggaaggggaaaagtgggagggttcaaatactcaggtcccatttgcagatattctaatgtaattggtcttaagtgaggctcaggctctgatatttattagaaacttcccatgagatcctaatgtgaattcagcattgagagcttctagtgagtactttgcatataagttctcaaaaataattgttctcatgtttttatatatataatgtgtatatatatgtgtgtgtctatatatatatatacacatatatatgagaatatatatctatatctatatatatatatgtgtgtgtgtgtgtgtgtgtgtgtgtgtgtgtgtatatatatatacatacatttttttttagacacaggttctcactctgtcacccaggctggagtgcagtagtcagaccatggctcactccagcctcaaccttctggtcccaagccatcctcctgcctcagcttcccaagtagctgggattataggtgtgatatgatatcacatctggctaatttttattttttgtatagacagggtcttgctatatttcccaggctggtcttgaactcctgtcctcaagcaatcctcctgccttagcctcccaaagtgctggggttacaggtgtgagccaccatacctggcctgtcctcatattttaattgaatatgttttttctttaattacaagtaatgtaacttgggcaacatggcaaaaccccatctctacaaaaaatacaatataattagccaaccgtggtggtgcgctcctgtagtcccagatacttgagaggctgaggtgggaggatcacttgagcctgggatgtctaggctacagtgagccataatcatgccactgcactccagcctgggcaacagagtgagattctgtctcaagaaaaaaaaaattacaataaagccttgaatacatacattgaaaagccttgagatgtataaattatgccagaggaagtccagtaaaagaagtactcccaaatagctttttgcaaatatagacatgccacagccttataggcatacatctttactaagacacatcataaaaacacatctgtgtggtacttttggtgcattttgaataaggactgaaaaaagttcacaaagattggtcagtttgaagtatggaatttaaatcacagttgtcatcttattaatggctactatttttcttgaaatttccattttatatgatatagtagtttgcaaatcactttcatttacatagtatacggtcatttgagtcatatttatttgttttgaacatggactttgatggagacattcccagttttttttaatataaaattcatttctttaaacatcagtttataattgaaaatttcagttttattgaagtttggttccagacagttaaggtttagtagtgtttgcatttttgtctttgtaaaaatatttgcacatttaatttatgattcaatttaatttttctgttatgaacatgagtgggtagcagaaaaaaattagagtgtagacattggtagttagaattgtgggtctcaaaaatggggtataattgagttgacaatctcatactttgtatctagaagagaaactgtggcaagaaacattttatatttattttttgttctttgggtataacctttataatgttaaccttttggaatgtatatattttgtgagtcagaatactatagactatgctgtagtaataaaccatccccatatttcactgatttatctcaacaagggtttacttttcctttctttctttctttctttttctttcttttttttttttttttctgacagtcttgctctgttgcccaggctggagtgcagtggcatgatcttggcccactgcagcctgtgcctcccaggttcaagtgattctcgtgcctcagcctcctgagtagctggtattataggcgcctaccaccatgcccagccaatttttatatttttagtagaggcagggtttcaccatgttggccaggctggtttcgaattcctgacctcgagtgatctgtccacctcggcctcccaaggtgctagatttacaggcgtgagtcaccacccccagcaggtttacttttcatttatagagcaaggggtactcagcatgttatagttacttggagcccagactcagggaggcaccgtattgactcatgtgacagggaaagggacactgatgaacagcagttcactgttaacacatgtcacatgggtacttctcattcaaaaggggtgagaaagtacattcctactatgtgcctgggaggagaggagaattggagtgtttgtaaacgagtcctagagagacccacaaacgtcttctgatggatgagataccggatgacagcgtatctttttcttctcaacataagcctgtattgtaaggaaggtagaatcttatcattgcaccttctcagataggaagttgagaatcagaatgcctggacagcgtcactatacacccacagctagtgagtagagggatcaggtttattatgtctttacagcataattatgtctccatatatttcattgatatgaaacctgtactgtgttctgctactttacattctatgatccttttatataattgctactttattttataatcaaacaaagagccagtttatgataagcatagattcttaggtttaagtgtgtaaatttataactattaccatcggtttgtcttttatactttcctttaaataatattttttagtgttaaaaattattcctaccttcagtccacctttacattttcgctaaaaaatattctgttaagttgaaaaacgaagcaaatcattgccactggacaccatatttatatcactgggaatgatgttgtttctcaataggatttgattttatctgaaattccaatgtttccaccgacaatataaagaaaaaacaaaaacaagaacaatctgctaatgaacagtttctgaagggacagaagggaagttttccaaatgcaaagctcagccaaaagggagaatttattgttgttgttgtttatttgtttcctgagacagagtctcactatgttgcccaggctggacttgaactgctgggttcaaatgatcctcctgcctcagcctcccaagtagctaggattctaggcaggtgccaccagaccagctcaatggggaggtttactaatgcaattttgctacaccaaaatggtggcatctatttatttacttattttaaataggaagaagtcagaagacttaatgaatcaagcattacttataattatattttttaatacaacgctttgagcatggacttaaaaatgcagagatgaaatataagagcttcttggaagcaaacattgttggacagacttataatgtgtcaggattttcaaactcattttctataactttccaaagatgctgtcaaatgaaggatgagtcaggttttccataaaaacatcattctaattttgtaaaacggtgtggctcaaaactataaattgggctgccaaactatttctctcaaatgtttgatggtttgggaacatgtagaatccattatattttcttcattaaaggactccatataataaagtgatttattgtgacaatttaatttattgtgataatttaatgtttgtgattcaatggaaaaacatcattcttttcataaatgtgatgtaataacataatattcatcactgggtgcacaaaagaagtttatggatatatgactctgctgctaagctatcagaaggattcgtgcccctgtcactccacacacgctttagaaagataacagccatgatttttgatatgtaaagtcccaaccattgtgtgttcaggaatctgtctgcatcatgacacaacggtggaactaagccataatgaatgatttagctctgtttcctctttcttcacaatgtgcccatgattctcataccaatatgcctttcttggacttatctctgaagtctgtaggagataacttcctccccattactagccagcagggtggcctgagtttccttgtctggagctgcaggatatttgttctatcctgtttacagccaatggggggccctttttcttccctacagtgagccttttcatctgcacagagggagatacaaaatcggaaatgatcttaattaaatgttttccgtccagaaacaactagtccactaccttgatctggcggaccttcttggaggtgccccttcccacctccctctgtggtgagattgcaggtaatagaccttatgacaaaagacaaggataaatatttatcagggcaccgaagaatttttgagtatctacaattatttacattcattcctgtgaacacatttaaccatgtgaggtgttattagtactccccgctgacattttttcctttataatattttcaaataaaattgtatcccctgaacaaattacaaaagtgcctttaaatatccagaataaatattttgagaatattcattttaaggttcaagtttctaaagtaccctattcgatgctaagttattgcaatatctgtcgtttagaggaacttgtaggtttattagctctataatgtcaacattcgcagatatgaagcattttatatttcttagtgatgtataaatgtatgaggaatacatgaaaatgcaacaagattttggttggcttaataatgagtttctttcttaaagatcaagataaaaattctgaatttctattgttctgtttttaaaattataaacttaaatgtatctagctccaatgtaaactctacattgccaactttttggaatatgaatataatgaaagtttatatctggttagttgtgaaaaaaattattattctatcatgtaaagaacatagaatttattaaggagatattacttaattggtagattattcacaagttttagctgaattgatttttttaaggaaaaaattatgtgaggaatttaacatatttgttttggtagaaacatgttttgacagaggaattttatacttagataaaatatcagtttcatataaacaaatcataacttttaaattataagtacatcttataatttttatgttttcacgtccatagattatttattgatagataaatagatggatagaaaaatttgcaaagttcagatttttttagtgataatctaattttttaaataaaatgatttaatatttgcacagtaaatgtgatgaaaactttgtgtacagatataaggtcctgtggtttggggtttcctttttgtccaaaaggcattgttctatgtgaattagacataccgatttaatattctaattcaatgcctataaaaccaacctttatttaattctctgctttctgcaattcctcaaggagtgaaaaaatagactgtgacttctttaaaagaggcattttgttaaaagaataaaatgtcttttgaaatattagtgaagtactagtattttaatacccttttttaaaaaaaacaattaaagaatcctatgattatttcttttccctatctcaaaaccaagcatattttcaagtaaaattaaatatatttgaatctacactttataatattacaataaaggaaagaaatagttatcattactacatttggagatttttttaaatgtagtttctcgttgaaagaatttactttcaaccacaagaagttgattattctgtgtgtttttatcagataggctttatataatttcttgtatctcataaggaagtccatgcataatagacaaagcatccaagaacacaaacttaatgaaaaaccagcttttgttgagatggtttcactccagtaaccttggaagtgttggcgagtaatttgagttttagtgacaagattctgttgctgctagggatggttttggccatttgataggctgagtttttacaagaataatttactgtgtttacagacagcttaggtcttattagggaatattaacccttcccccaagtttaggttctatgtgtgcgtaaattaagagatctatttctgttttggaaagcacacagtatattttaaatataatttttaaatgtaatttttaaaagaaaggctctattttagccttctaaattatatcttctatatacacttggtattgctgaataaccaaaattagctttcgcttttcttgctggaaatttgtaattttcttaacatattctttctgttctgagtaaaagtaaataaaggtaattaaaatacagtatttttttaaaaacttttgaaaaggttcatcttttaaattcttcaatgatatgtaaaagtttctacctatgaatttattttttgttactgataaatttgtattaaataattgatgcctaaaatatatatttagtagaataaagaaattagctataaaacaaaattagaagagccacaaactagacagggcactgtggctcatgtgtgtaattccagcactttgagaagccgaggcaggtggatcacctgaggtcaggagttcgaggccagcctggccaacatggcgaaaccctttttctactgaaaatacaaaaattacccaggcatggtggcaggcatctgtaattccagctacttgggaggctgaggcaggagaatcactagaacccgagaggtggaggttgcagtgagctgagattgtgccactgcactccaacctggtgacagagggagactctgcctaaaataaaataaaaataattaaaaaaaaaaaaagagccacaaactaaagtctggttgggttgggttccattgcctttgctcagaatgtaagctgctactatctaggtacatcagctgtacatatgtcttgtagccctttagggtctcagattttgtctctgaaaataagaggattggataaaaaaaaaaaaaagctcagtactattttataattccagatgacaagctgaaggatcaagtctttagcttcttaaaattgttatagaggatattgaaaatgttattactaaatttggagtgaacatacatgaaaacattgattctttttatttttgttttgaaaatagttaaaaataaaaacaaggggaatttattatgtcaatctcacaatttataaagcttgatattttgagttgcaagtaaaattaaatataaaaatctttattaattctgtcacattagtagaggtctcaatgctgtgaaagtccatgtctaaattatgacaaaattattttcaaccatatcagcattgtttcagaagaaaagatcacaactaaatttacttacagcaatcttacaggtttaagttttattgcgatttcaaaaacaaaataatttcactatcaaattaaaaacaattcattcttttatccagaaagatagacattaatttgaattaataacatatttctgttttttatgttgcaatttctttcctaaagatataaaatcttgtgccaactgtcagaaaaaggaaggatgagattattaatatgtgcaatgtgaatcaaaaatgattcaagagaaattatatgtatatcaggaaacttcttgttctttcttattgatgctaaagcagggtggtgatgacttgaggtataatttagttaacactatttagatatatattgtcaaatttagaaacacatttgtagtaatataatatatcatatatgacatgcttttctgagggatttgtgataatagtaggtttcatgaaaatctctcaagaagacattgatttttttaccaaaaggtaaggctttatatctatagtatggggatgtaaacataattatcaaatgaatatttgattcgaatgatttatttgatattcacataaatcaaatgatttatttgatatttatgaatgtgatattcatattcatcaaataaatttgatattgatgaatatcaaataaatggcaaagaaaatatttatgatgagatgaacttttttttattcacatcagatgttctatacctagtattattaccttttgtcactcatcaacaaaaggtagtattgagttgttttcttactggcactttaaaatattatgcactattaattttcttcagtaaaatttaatctacttaatctgctcttataattatattctgtgatgttttccaatacaaatagttattccaaccacttttagaacttgtttcctttccaatgtcctttcatagcatcttttagtataaaacaacctttgggataaatattaataacatcaagtcaacacacagagtgcctattcatctttgttcattatatcacttgctctatttagatgaaaatcatataatcaaaaatgccaatatattgtctgtgtgacaaagtgtctccaatgacacatttagtataaaagccatgttgtactaatctgagaatagaatagatctatatctcattctaataataattctcaatgaatagtgtggctctttcaactgatgcattaaacagataaagatatttcttggagagttcagtcagttggctatgccgccagttataacagaaaccaattttcaagccgtgagttcttgttttttgttttttaccaaaggtactgtttccgtacactggtattaaaaaaatggattattctttttgatataactaagatgaaacattttttcattttttcctgtgattttcagtttgtcatttattattatatttaccagttttcgtttctatgtgccttacacacaactctcacaaactttgtttctccatttgctttactctttttttaatcaatctgtctagtttgtcctgatgaaaccaagtaccatagacagggtggcttataaacaacataaagttatttctcacagttctggaatcagggaagtgcaagatcagggtaccagcatggttggattctggtgagggtcctcttccaggttgcagactgccatctgctcattgtattctcacatggcagaaagaggactggagggctctctggggtatctttcataagagcactaatcccactgacgagagctccactttcatgatctaattaccccccaaaggccccaactcctcatatcagcacattggaggttaggatttcaacatatacatttctgggcaatgtatacaattccattggacagtcttacaatcttttcagtgtttacatgcataatttactgcaagacttggaatgaaacttcttagctttgcttggtctatataatatgcttcatcttaagcaagctctacattactagtgatgttaaatttcagtaaatggaaaaattccttgagaatactatattctctttcattatccaaatacctctaattttacaatttgatcagtgttcctgcccgtgtacaacccaattgaattacattggatgtaattgccagtttttaaaatatatctttggattaaaagataaatattatgaaggaccctgtctcattgtgccatcagtatatcatggctgagactatctcagataagataatgtattagtcgtctgcttcctaggaaaatgaacactaaaatgaaatatggaagaaatggattctgagtgttaaatgtgagaaacaaggtttatactgaacattctaagccattgccaaatgtcaactttaaacttcagatcaagagattcagaattctacagtgtcaggtatggtagatgttctcacaccaaggtgaacacaagaatcaaccgagtgatttatttaaaagagagtcctgagtgccacccccagaaattcagatttttaaatttttaaataaatctgagtgtgtcttttaaacttacattttgtaccagcaactccaagttattctaatataggtaatccacagataaaaaatatttgttagaacgtattttttaaaaatattgtttagaccataaatattttagccttttcttttttttaacaaaatataaatttatactttttagacagcaaaaaaaaaaaaaaattgtttaaagaaactctggccgggcgcggtggcacacgcttgtacccagcactttggaaggccaaggcgggtggatcacctgaggtcaagagtttgagaccagcctggccaacatggtgaaaccccatctctactaaaaacacaaaaatcagccggccatggtggtgtccgcgtgtaatcccagctactcaggaagcggaggcagaagaattgcttgaacctgggagacggaggttgtggtgagtcgagatcgcaccactgcactccatcctgggcaacggagagaaactcagtctcaaacaaaacaaagcaaaaacataaactctaaattccattatgtatgtatgtatgtatgtatgtatgtatgtatgtatgtattttttgaggcacagtcttgctctgtgttgcccaggctggagtgcagtggtacaatctcagctcactgcagcctccacctcccagattcaagcgattctcatgagtagaatgcctcagcctcctgagtacctgcgattacaggtgtgcaccaccatgcccagctaatttttgtatttttagtagagacggggtttcaccatgttgaccaggctggtctcgaactcctgacctcagatgatccacccaccttggcctcccaaagtgctgggattacaggcgtgagccacctcacccagcctaaattcctttaaaactatatttatttcttaagaacctgatcactagtctttctgtcagctctttctctttttattttttatttttggtcatttctggtttatattttagaatgtgctactatagatttgctgggatgattctgattttaatcaattttttttccttcttgtaccataaaaaattgaaatgtcccagaaattttgaatacatctagaatctagactgtatctcccagattcctattcatataaaaattttcaggcaaattgtccctctttggggttcacaaatcatgattgcaagagctagaagtaaaccactgtagaatattttagaggctaatagtttagaggctaaagatgtctcagagaatattggtctacccctgtcctatggatgaattcactgtttagcaaagcactggacgtgtattatgtcctagagtatcccaaaagggtatactgaatcatttctaaaaacagtcagtgtattaggaatccatgtgcaagtaacagaagtccttagtacaggagcataaatagaagcatatttacttgtctcatactacaaggagcctgagattaggccacaggctaatatagacactcaagagtgccttcaagatttcgggctcttttttttttttctgctctgtattgcgctgactactattaccctcatgctaactccttcttaggtagatgattgctacacttctaggtcccatatcctcaggataactacctgggaaagaaggaaagaacaaattagcgaaaagcaatgctctgtttttcaatttggaaagagatggccctttcaacttcatgttattacccaaaactgtgtcactttatctgctctggctttatgagaagctaaaaaattgagtaattttacctgggtacattgatgtcccaaactaaatcagggttctgacaggaaaaaagtaggaatacatactgtatcagaaactggaattgtttgctacagatagtatatctataaagaaaaatgtgtaagaaagactcagaacaattaatgtagacataaagatgtagattattatttgcctgttacatgtattaaccgtttggtagactattttttgggagacatcgttgtgagtcttcataatgctcatctcactcacccatgacagcaaaatgggggttggtcgctaattattaggtaaaacattctaaactaacaggaaaaaggaatccttgagttaatcttgggaggataacagtgggtgaaagacgatgataaatgcgcaaaactgctaaagtttaaatgattggcactttcaggatggtagcagtcaataagaatatgactgctgtgtagttaacctctgcactttttttcttttttctttttttttttcttttcttttttttttttttgagatagagtttccctgttttcacccaggagtgatctcggctcgctgcaacctctgcctcccaggttcaagtgattctcctacctcagcctcctgagtagctaggattacaagcgcccaccaccacacccagctaatttttgtgtttttagtagagatgaggttttgccatgttggccaggctggtgttgaactcctgacctcaggtgatctgccccctcagcctctcaaagtactgagattacaggcatgagccaccatgcccagcctctgccctgtttttatcagtttacctttatgactgactgaggaagtcctgaagttgcagctgctccacttctgagtgatcctggtttttttatttcttgttgtcccacagcagacagttattaaaatattgaaataatgagaatcctcaacaactctagtcacctttggcacctgcaaaatagaagttttgctatagtggtctagggtgagaggtaccccaaagaggtatattgaatcagttttaaaagcagtcagcttgttaggatttcatgtacaaataacagaaatctctgctacagtggcttcagtagaagcatactcacttgtcttatactataagaagcctgatattaggccacagagctaatacagaggctcaaggatgtcctcaaaatgaaaggtttcagtgttcactggcagagtttcctctggcaagcctggaggggatgggcagaggctggagtggaattcagattactcagaattaatcaggtcagaattaatcctggttattactttataccatggttcagttacttttataggtgaagatgtattttgtgcctaatcctacaaaaacatccaccccataatatgtcaagagcctgcatttattctgggaagaataaccataaaacctctcaagagaaattttccactataaaatacaaaagtaattttatgcgatacacagatcaatattacttgataaatatattacacaatggtcttgaacattgaaatatatgttaataatactttggtgtacataatacctgtatttcccatatgtattaacatcattttatagaaaagatcataattttaaaaaaagggtttgcaggaaggtacagttgggacctgtgcacacattgcatacatacagggtcttaatggaaagataattcaatacctgctgaaaccataacagatcattaagaacttttaaaaagacccgtgtctgtattgaaatagagaacctagctcctacttcaaatttacaccagaaaatggaacaattgatattatttttccattctttaatttctttttgcttaattgatttttgttttgtcttagttatcagtttgtcagatagcatgtggtttgttatttttagagagctcagattttccaaaataagagtaagcttctttgtcattattttatattaccatatatatatatatgcatatgcacatagatatatatgtgtgtgtctttacacatatgtttactataaaataaagaaagcaatattttacataatagttttaaatattctgtaagtaccatttggactagaattggtaagatttttttgtttttgttttgttttgttttgtttttttgtttttaatttgagacagagtcttgctctgtcgcccaggctggagtgcagtagtgcgatctcggctcactgcagccttcacctcccgggttcaagtgattctcccgcctcagcctcctgagtagctgggttacaggagtccaccaccatgcctggctaatttttgtatttttagtagagatgggtgataagcattttaaacatatttttaaaaaattatataaatttaggggtacaaatggagttttgttacatggatataccgcatagtggtgaaatctgggcttttaatacaaccctgtaatatcagttttgtcaaactcttatcagtcccacagtttatgaagagttttgaagttttgttatggtgtggattacagaattgtaatattgtcgttaacacctatgggtcttttcaatgaccataaaaaagtttggaacctgtattcattaaggaagaatttcactaacctcagaaggaatgagatatggttctgagacagagagaccctgatgaactctaatacacaatggtagttccagcataagcataatcatatatggacaagctaatttcattccacccttatggaaatctgccaaactccactatactttcaattgcaataaaatagcttcaggcaaatctgactttttatctacttctttgtgtactgtaaaaataaaactaaaacaagtttttactctgaaaagcttgtcgtttcaaaatgtatagtattaataactatgaagccatacagttatcactaccattacttggtgtttattttcatttattttttcctgggtattgattttgcatagttggaatcatagcacaaaataattttgtccatttttatataaaagggctattaacctttgttaatttcattccagtttggtaattggcttccacttcattactgttatatggatgtttatataactgtgataattgcttgcgtgcaagacagagtaaagaaatgagaagttttacaaatttgtaaaatttgtgtcagtgattgagcctaaaatggaatctttacttcagcatatttgacccttagactttttaatgtttatgaaaacaattactaaaattatccccattttctacttgatccagtgtacctcatggaaagttaaatatgtttgaaggtagtgaaagtctcagcaagacaaatgccataaaatgattctaatattgcattcaaatgtttctatcatgtatatagatatgtatgtgggtggtctgaatgtatgtgtatgtatatggaaagagagaaatgattcataatagattttacattgaaatgtactaagcaaaataatagaaaagcatgctgcagaatataaaagcaatagagacaagcaataaaaaaaaaagaaaatgtacatatcagaaataaaacccactacatgcttctgtatatttgtgaataaccagtactcactgtcatgtaccaattaaaaataataggaaattttataaaccctataaatattgtgtttaactttttataatataggacttcaatagaaaatagactgcataaattaccttttatagaagtttagttgttaatgatcatttttagggtctcatccagagaggttcaacacattgttatggctgatttaaattatgattacaattatgaaatattgtgtctgtgaagttcaaaaatttacataccacagtcagcagtgaaatctattagaagctctagtgcgtttgtaggtctaatgtgaattgatatactggttcaattttaaaacatgttaattcagtcccctgtgccatgccactgggattaatattattataatatgtcatatcacttaaaattaaattatggtatactcttttgtgataaaaattaactaaagtgcatgaaattgtttctgagtctctaacaaaattacacattccttcgttttacgtaatttaaaataatatgaaaaatgtcaatatttggagctaacctcacatcattcaaattatagctaaaaacatagaattgctacattatttcttagattaaacatacttttccttaatgtgaaattgatattgaaatgtcatctagacaatgctatggatatctacagctttttaagtttgcatccgttctaatagattatttgaaatgaataatcatcagcttctttgagacagtaggggaaatcagaaacttcacagatgtttagtgatcttccaaggacaaaataatagaagtaatttaaattgctaacgtattggtctgttttcgtgttaccataaagatactacctgagactgggtaatttataaaggaaagaggtttaattgactcacagtttctcatggccggagaggcctcaggaaacttacaatcatggtggaaggggaaggggaagcaggtcacaccttacatggtggcaggagagagagagaaaaagacggcagggaaacctgccatttttaaaaccatcagatctcatgagaactccctcattataaggagaacagtatgggggaaactgcccccatgatgcaattaccttctgccaggttgctcccttgacttatggggatgacaattcgaggtgagatttgcttggggacacagagccaaatcatatcaactagtttgtcatttggattatagcactcattgggaggcacagtatattatgtaactttgaagtataactttcagttaatttttttttttatcattgcatttgtacacatttttgccagggaggctaaaacataggttaggtaccaatatttaaatctatggactgctttccactgggggatacgtattttcaacggtaaataaaagaaaataattttcatttcatagtcccttaaattttacttggagaatagattgcctggtaatcactctatcactcctgtctcttttcttagaagcaggcaaagttgcccagctaccatagtgtggaccttatgggacagctctggatatgtatgtcactgatacccttgttcactgtcaggttgacagacctgatggaggtactctgtaccacctgtatcacaggattttcctgcaaattgatatcaatctatcaattgaatagaattgaatattgaatatccaattcccctccctaacataataaaatacactagtaacggaatttcagtccccctggaagagagaagacattttggggctggtattatacttaggaccttccaccaatgagtccctccacgttaaaaattgtcagtaagagtatcaaatagatcacttatattagcatttcttcttccttctactgtgtaaagtcatcaaagatcattttgaagactgattcatatattattaaatgtagtattattttactattttttactaaatttgggaaatgactcagaactctttaataattttgagaggtatgaaaaataaaagtttttttccccatatttttgtgttggtagccctctttaaaatagaaagtatgaatttatttaagccagatcaacccagcaaaaaacaacaaaaaaagacttttgactttatcttgtgttatttttgttactgctggtggagaatttgtttctcaattcttccacttatttttataaacatgaataaattcctcattgaaaaaagttcctgtatttctattttttagtgctaccacgtaacttattttgagtgtgacatttgccaaaataaatagttccaataaagttccaatgaatacttgttcacaagtatgtccagcatgtcatctatgctaaatagtttctttaaatgtcatttcttctccaatcatactaggtactaaatcatctctattttctactgccactggaataagttacatgtacttcagtttacatctatctggtatattattaatggcaattgatggcttaggaatgaaaagttttgtgattaaaacttaggtttagcccgatatgagaggcaccaacatgagtgttaatacaatagataggttatcataaattattgctcttaaaatgtcaaatttgttaattccatcgaaagaaatagcttgaaaaaaagaaagctagccaattgcctttcactgaaatgtaatggtttatctgtagaataaacagaattagtttcccttcgtttgaagattttgtgggaaatacatttcattcattgtgtcccatcctgaagtatgctagtctatgatttttattatgccaccttacagaaattatagaatacaaaacagatataatctcctttttgtgcagagaataaatagaaatgcatatagaaatataaatattaaataatccagaactacataaaaagcaagtccaattcattcaacatacttgtgtattactcactgataatatccatgaattggactatttttctccaactcacctgtctcatgctacacaggagcctattttgaatgtttcccgtgggaaagaaacctcatgcattcatttcaattaaggcagtgattctcaactgggggattggttgtatagtttataatagtaatggtacagagaatttctactatacagaaatgttagtgatagaatccttaatgatgttaaactgttgatggaagtatgtcatgtctgtcaggattctgagatggaaaaagattggcaaatactgaactataatattggtcactggtagtagcttggaaaattctcttctaggaattttgcatttgatagggaatcattgaatatccaattcccctctctaacataataaaatacactagtaagggaatttcagtccccctggaagagagaagacattttggggctggtattatacttaggatcttgccacccatgagttcctacatcaggtacatgtttacttgacattcagtcatgagattcctgggccaatctccacactaacatgcacagttgtgtgtatagacgagacacatacatagtaggcttaagagcaaatgtctaccttttcctctgttttcaactcaaagtgttggtcctgggtaaacaaaagttttgattatacagtttttatcagtagatacccccaattttttttccatctcatctcaaatgattcattgcctaccaataaaaatagactgtccactggcagtaacttcagatctaatatttatcaattgtttaacagtgttgtgggataattccgccgtattgtttactatttctcttttccccaagatcagatatgtttgtctctagttgcatatatttaaaactttctagtttatattttcaatacgaagacatatttaaatacattaatttccatagcctgaattagagtagcatttgtaatagcattttcatctcagttgatattgattttctaaaatacatttgcctcagaaacattctttttttcatttggcattttctttacattgaaaattgaagaaatgcagtcattaaattatcattttcatttaactggatcttgttcaaatttcaatcaggtgttctacaaaaagttaatagtttaccagacattttcacatttctactgtatgcaatgggctattagtttttttttaaaaaagagaaagcttacactttttctctctatgatttggcttcatttattgcaaaagattgcaaagtaattgaaggaaaatgaaaactaaatgaaataattaaataagcaatctaatttctaggtgttaattcaattctttttctaagcaattttctgtattttaaacttcatttgctttctatctactttttgcctgcaggcttagatgtctcaaattatgggatggatacatcccttagtacttagcatgatgacacaggggaaaatgccactcagaggactagactaacacatttaacagttatttcattatttggtggcctcaaactccagatggccatatctagttgattttattgtctttgtcgattaaatacctgtattgtaaaattgtatgactataaaaggataaattttgatttactaaaggtgatcttctgagatattttgagggaaagaggtagtataccaaaatggaaatactacgcaaggtaagtgaaaacctttttaatgtatcttggtcagtaaattaaaccaagtttatattgatgccgttgccaaatttccatgtcttttaccaacacaggttcaaatctggaaaaaacatttactgaagaattcactgatttggcttgtaaaagccttttctataaaccataggatcaattgtcagtcctgtcttgaatgattacttatctctaaagctaacagagttgctatttaagctgaataccttccttaaaagcaagaaagataagtaggagtacacaggacactgtttgttagcattataacaaatatcctccagcataagtgatcaggatgttaaatttatggtaattgaattcaagaatttttgtcagaaaagtattttcagatatgaataggtaaattcttagcaagctagtcttctttggaaggtgcttatatttgaataaaaaggatttctttaaaaaaattgcttttaggatgccatttaaaagaaataggcaaacttcagaagccttaatggatttcttacagaaaacaaaccctccataaaattccaccttagcttcttgcagccctgaattcatgagatgttaactaaattaaccttgactgtcttttattggtctgtttaaaaaattagaaataattaatttaaattgtcattgcttggttctaaatatctttgctggccatgtctatagagagtaggggagcatttttgaagataatcattagcaaatttcctagattcttccttactactgattgctttattataaagctaatattcatagtttgattatattaatgcgatcttgttttcttaatctaactgcatgaaaacatacatggaatgacagatctacctgtcatttacaacatacttaggagattgaccaatttctaaatagtggcctaattaagaaataatggacattaaatcaaactgtgtgtatatgtatcttcacatgtttgtaaattatcactgtggcaagttctttatagcacatcaaagatctagttctttatcactcctctgcccttggagtttttatgcatacctttgcttctctgtggctaagcacatacccttaaattatatgattgcatgtggcagcagtctctcttatcgacatcttgaagacggatgaagtgaagctggatttgtggattttgccttcatttgtgtcagaaaccaatgccctctctcctttgggagccaatgccagttatgaacaaaaagccgtaagcagttgtgtttccccactcccatattctaagtgatcagaatgtgggatttcaatgatttatcgtcttccaaggataggtacatttcaggttttttaatcatgttgaaaacttccaaaacccattactgctgtatgatatttacacggttctttactctgatagggcctgttttataaggctaccgtgtctaatagtaagcttgcttttaattgtgacagtctgaaagcttactttgaaagctgcttctagagaaacctaattattcctggttgggaatgttcttctggtgataccactagcctcctgggtactaagcatgtctgatgataggtgattcataagctcaatgtgacatttcccaatgagttgttttgtcacgggttatccattttgtcagacatgttatttcatcctgagctttaatgtgactatcatgttgctgggcaagtagctgagagtgtcatatagcttgtcaaaaccgtaacaccatttgaaccagaatatgtaattttaaaatcagagctgtgaaatttaaacgaggatcttgctaagtcacagctaattcctttcttacttggtaacctggggtctaatgtaagagtattaggttgccgtcatcagcctttgtaaataagttaaatcaactgaaggacatagtttctggctagggcagggtctgtcacctgttctgggttaagttactgtggggtgcatttgaagatttgaagaaagcagtctgttgagatgacgaacttcttgaatcaactgtgacaaatgcaaaaacccatctgtgtttttttgagtatcattctagtagtcatgcctctagtgttgctttacttactctccaaacatgaaagttagcacatctattaaaaagcaaatctgtaatattagtagaaatcattctgatatagtaactttgcatgttctataaattcagaggagtagaagattacaaaattccaacaccaatacagcatagctatcaaagctgttcttaaaaatagtttgttaatatgactacattttaaaataaaattagaagttctttgtccacatagaattccctttagttaaattattttgaaattagctagtaaaaaggcatttacagaatttgaattagttgacagcacaattttaatacattcctttgtgttggtatttggagtttgtttccttttaaaatgtttataaatatatagatatacacacacatatatatacacacacacatatatttacacacacatagataatacattatatttactatatatatgtatatttgtgacagttacaaacttttctgaaacatgtatatatatatagtagtggtgcctgagtgtttctaaaatcattgtaacaatacattaagccaattagtagttgaatcaaaataaaaaaggcagaaaaagaaagacttcataaaaaaatagtaagctttgcaaatatttaaatataaaattaatacttagcaatcaagggtaatattgtaacagaggtgtacaaatgtttaaacctaaagaagataagtataagaatattcattttaaaattagaaagtacaaagagatgacgtagggacatgtgaactgctgatgtcttcatattttacagaatcctacagaattataccctgtattatagagttttaagatggaaaatgacatcacttcttaatattttaaataatttcttaagcaaaaaggaaatttaaagaaatcatatctttgttggtaaagaaatattagaaattcaccactatctttagtgttacttcagatttattttgttataatctataaaaattaagtttaagacttaaaaaagtgtttataatgattaaatattcataaatgtatcatttaccatccatccatccatccattcatccatccatccatatctacgcacagaaaaatgcctgaaatgaatttcccctcatatcaattccagttatttctttgttaggattttgtgtgtttaaaaatattttgctgtacttaaataattttttgaggttttttttttttttttttttttttttttgcagtgaacatgactcctagtaggaaaagcaaggaagaacactaataaaaatatgctaagatattattgatggttaactctagatggtaagaatatgtatgatatgggtgcccttgtttacttctttaaacatttttagtatcttttcaattttaggaaatataacttttaaaattaagagagacaaaccatggtagaacctattattagcaaagtatggtatttagaagaaaaaataattgaataaattgttttcataatgtggagttatgtgctgcctgttaagacagcaatcccaataatgtttccattcctttaggaaacacattatgaaccttataaaatcgggtgggattttccatagggatgaaattcattagagcaatgtctgcattctatgaaaacatctggtggttttggtcattctgtcttgtgttttggcctaattttctaccacgttgtaaggcacagttttaagaataattcacacatttttccatctagagatttttgaccaaaaaaagtatatttatactgatggactaaacaagttgcattataattgtgacagttacaaacttttctgaaacatgtgtatagttttttttttttttaattttaaaagtagatgtcacacctaaaatgggtaggtccatttcattttataaggaaagcacccagaagggtccatatgtatttgtgctcgaaaaggaagtaattgtgtgtgtcatttccgccccctttttatcaatattgcctaatatcaaggagaatcagtaataatagaattattaatagcagtaatagaatcagtagaataagagtggtagagttagtactcatcagtgaaaaactaatcaaccttattactttgaagggaaatctgggaagaaagagaatagaatgaggtacatgttagaaatggaaatggcgaagtaagtaatttttctgattttcataattctgtttcactagttaaatctattttccacttttctttccttcctttatctggctcggttctcactttagaaggcaaaattttgattatttgcaagagtgctcccaactcaagtctcttagtcaacatttccttccctcaggcttcagtctatgatatttcatgtaataatttgtaaaatatagttctcattgcgggactcctcacttctattttaagatatttttcttaaattattttatttctattgctgcatgcattcattgatttgagataaaattttataagtttgtggaaatcattgaataggaacttctcagtcagcgctgaaagaaattttatgaatgaataatacaattccctcctcctaatgaaagtattgtacatctcacatttagtttatattgattgctttctgacatggaaataaaacaatctttatattatgcagagttcctgttagtggtactatcaagaatataaatctgcccttgtgacttctatttctatgcttttctccaacctgaagtaaccccaaccaggtttttaattaaagtaatgtgagtcactgagtgtatcaccccttttatgcatgatcaagttaccatagcataaatatattccaactcttttgtaaacttgaattttatggataggtaatacaattcttctttccaaagtttgcagttttacttccacctttaaaaaatgttgtagtctcttggcagtgcttatataaaaatatgtgaagtgtgggtaatactagatatagtatatagatgtactagatatggtttgcaaaggtggacttggaagccattttcatttttggcctatttagaaaattaaatgatactactttttcctatacaacttatatttggtgggatatttttatttacttaatttgaaattttagactgaatagtcttaaatttccagcataaatattctatattttaatcaatgtttccttgtatgtagcatttgtacagttagttttttgaagtttttaattttttttttgtttgagacagtgtttcactcttgttgcccagactggagtgcaatgggcgacctcggctcactgcaacttccatctcccaggttcaagcgattctactgcctcagcctcccaagtagctgggattacaggcatgtgccaccacgcccagctaattttgtatttatagtagagatgggatttcaccctgttggtcaggctggtctcaaactcctgacctcaggtgatccgctcacctcagcctcccaaagtgctgggattacaggcgtgagccaccattctcagcctgaagaaggtctttaagaatatcaatgaacattaataccagtaatatcaaatgttagccacacatcatgaatattaccatatataagcacagatggtaatatcgggtagggcttaagagtgtggtgtttggaggcagaccaacttccaacacttactggcgttaggacctttaacaagccttcccaaacctcagtttattcatctgtaaaggtgagaataattatattactgcctcttgggtttgaggagattagagataatgcaattgctgcagggcctgactcaaagaaaccactctaaaatgttaactagtctcattagttattcattcatcaaatgacaaaatctgttttgctcagttctaaataggaggcctcaaaacttttagaggatggtttaggaacttgagtatagtacactaaccaaagttcttggctatggtcttataccaattgaggattcttcagaagggcttcaaaaataggcaggtgtctatgacaggtctgtccatagctcaaattatttcaaaaaaattccttgcgttttccttttgttctgccatagaagatgattattttttttctccatgatgttgtcttgtttttctgttagagggctgtcatgtggtgtgctaaacttttagatagccagagattagctatctaaaagtttcagaatgactgaaatagttattttttctttctttctgtttttattatgtgtctttgcaaaggtttgttgagggaaaattaccaaataaagtttgaaatagtattagtacctttaaatgttttctttaaaatatcttaacgatagatagatagatgatagatagatagatagacagatagacatagagatatatggaatgcttcattacgcatactagacacttgttgattttttaaaaggaaatgaatttagaaagcaattttcctcgaaaccagtttttttcttctttggtaaaggataagtcattcttacaactctcaatgatgcaaggtgaaatttatccaattttaagtagggatgctaaataatgtagagaagacacaagcacttgttttggagacagaatatttgccctctgggcccagatgtgccatttaaaattgagtgttctttcattcatttattcattcttgcccttgtttggtaaagggtattgggaaagatctgtaattaaagataaaagtgtaaaaagaaagaaaaattgccttgaaaacaaaacaaaagtgccagcaacggggctaaaaagataacataatgttatatgcccttgctataaataggtcataatttttgtttcaagatttctagcagccaatgcaaaaaaggaaatcctggtgaaattacacaagtttaggatatcttccagaccacgaatcaaccagtcacaaagaatatgaatacttattttcttaatattaggaacagaaatctcccatgggtcctagtaaggagaacatggaaagtaagtgattacgtcaattgtagtatcttttaaaagcagtattgagttttataaggaagtcacttcttcttcagcctatacacttccataatttggagatgtttgggcttcctttaaggttcctttcagtttcaacatacgtgactctaagctggaacccgatgagatcagtgagttgttaaatgtgaacatgatcaaactgaattaaaaagctgttaagaaattagatatctcatcttcagtttttggactttatgatttttctttccattcctaatgttttttctatcacagaaaaaaagtctcatggtaactgcttttaattttgactattttctattcttccaagaaaatcatttattttaaacatacaacttatcttttttagcatattctgattgatgcaaatactcttgtataactttcaatagtcaatgaaatattggataaaatgtatttctaagaagatagccatatatgtgtactttttcaaaattgctgctttttgcctattattgtttgctcgtttgtcttttggttttgccttactataatagaagacttattagttatatttaactttcctcctttgaggaactaatcattatccaacttaattcataaacttcacagatggcatttcttcttaacttagaactatttttgtcttactattctgattctttcttctataagacagcctcatgaaacctaaacacccaacatggaaatattagatggcaaatatgttttccattttgtttggccttaattttattcaggtaaataattgggttgtgcttaacttacatggaatactgcagtttatatgatgtgtcataacatcaaagctaaattaaggaacaagggagagagttgtgcttttttccaaactagtacaacttataatgttatgctgttttttaaaattattgtcagtcttgtttctcttatagcacaaggtctctcttaattatgtaatttaaaaaatgtatccttctcttcaagaccagcctgactaacatggtgaaacgctgtctctactaaaaatacaaaaattagcctggtgtggtggcacacacctgtaatccgagctactcgggaggctggggcaggagaatcacttgaacccaggaggcagaggttgcagtgtgccaagatcacaccactgcactccagcctgggtgacagggtgagactccgtcttaaaaaaaaaaaaaaaaaaggtatccttctcaacatttctgagactatatctcttaaatttgttttgcagctctccaaggaccagttgtttctcaaataactggtccttggggagctcagtggattgcctgaaaaactctgattgagttggggaagatttctaacaggatggaatatttgagatttacataggaattttccaggtgaagaaggggaatatgccattagatctacaaagactgtaatccagtagttgggtactagaagtagagatgaaaatttcattggctgttaagttttcagcatcaataattagaagcacactgatacagcctgaaacaggtaacaaggacactcacatagagtggatcaaacaagatagaaatttacttctctttcctatcatgtctggaggaagataggccaacgagagcaggcatgtggctcatcaccttaaagatatctaccgcctcagattctttctatcttattatcaaccgtttttacatgaatgcgtgaagcttcctgaactgtctgtatattatggcagtaatagactataagcagaaattaatgatcatctctctttttttgttcacacaaatcagattttgaaactttaaggtttcttagggaatttatagttctacaaaacacttagaaatgctgccttcggttacggtatctccattaggttccaattctttggtgtcaggacaatttcttacgtgttttggagcccctctgctatatagcagactctcaaaaatatgtaataataaggggagaaagaaaagtaaggaatatgactttcatgtagatttgaagttgtaatttcattgatctcgaagagttggaaggatttaggtaatcttatgcagataatggtaattttaaagaaaaggtctcattatgtcatagtcactatgtggactaaataaaaggaaataaatgaaaaggttgtgttacagttatcattcaaaaacatccaaatgaaaaaagtattttttaaatcagatatgcatttattttggggtggattttggcattatgcacaagtgttctcttgaaaagcaattcataggaccctaactgaacttttggattataacagaggtaatgtcattctgccaaaacacactgaaattagcaaaagccagtacccttactaatttgattcttattaagggaatccaagtgattgaaaacctgagatgagatttaactatttccgtcatcaaattcataacataaaggggaagcataacattgccagttaggagagggtaaattcaatttggaattttccagtagtaggacaaaaaataataaactcattattctcttcagattattaccattattgctgctgttgttttgagtacaatgactgcttacttgtgctctctgacagtatataaccaattaggggatttgaaatatagggagtcatttttgaacaaggaaaaggcagcatagaatctatctatttgcatatcttcaaaaggatttatttttatagctagtttacccattgcctatttacatacatgagtttggaccaaataatgttctaaaatctatccaagtttttaaaaaattctgtttggaaatcaaattttgtactaattttgtcaattattgttgtaaaaatctgaaatgccagaccttttatttaaaatatcaacatgggtatgaaaaataataacatgggaagatggtatctatcatttgacgggctttcatcaaccctgtatgatacactccaatcctatcatgagctctttgaaaaggatttagtctctttttgtcagatgaggataaccccagacatttaaggagctgatgttttctcaattccagaaaaagaattggaactcaaatctgtgaggcacgaaagtcccgaagccctcattctccactgttacaaatttgcagaaatctgagtgatatgaaaaatatttatttttattgatgctttatacacatatccatattactttacatacaatgaatacttgtgtaaaattatttaaaataaggtgcttcatatgttcagtgttttgtttttgactaaataaaatatttattgaatgccatttaagagccctgctacatgttgggaatacagttgtaggcacaaaaaggcatgattcttacttttggggagtaaatggtctttagggatcatttggtttttgcaccataggtgagcagaacacccaaagcaatgagtcaaagtggatgatataatttttcttattcccaaatgcaaataaaatgtatcttcaataaagtagatctgtagtatttccaaggaaagtgttattttcattgaaaaacacataccatgctttctgtagactcttaaatatcaatcttcaaattaaaaaaaaggttttacttccactgccctccccaaccagcccatgaacatgtggcgcacacaccagcagaacacatacatacatagaatctgaaataaacctacatgtgaaatgaccaaatggtgcatctggattagagttttagacagatctgtgctattatttaatttgttagcataattatattttatgttttattttcttacacttaggaatttttaaactgtaaaaaccttatattatatcattacattattaccgacatacctcattacatttatcaactggtttttttttttcagaattttcaagagttgtagcacattcataagattttgtgcctgttattctgtcttgaatattggtgcaaattttgtattttcattgcaaaatgccagcctcttaagtaactgtaactcatcatatgacaggtggaataaaatggctaccagtaatgcagagttaagctaggaaatagtttagcttttagtgttaattttacttcaaggaaattagagcattttatacatttataaccatcagtcttggctgaaatacttaatggaggcatgataacatatcttgtacctttatagatgttgtagctcaaaattatgtttaaaagttgcttttccaattaggagatcctaacttcgttggcaaagaaataatacacggtaaaacaaacaaaccaccaatataggcattatgaaagaggaaaaacttaataattggcattgcaaatgggtaattatctaattatctacagaagaaaatgttaaatgacataataaacagaattagaaaaactgggcaagatacaaatattagcttttcaggtcagaccatagcacaaaaggagatagcaaagtaagatttcagtttgggattaaaacctcttaaaaaggattttaaaaagatcaattaaatttgggcttcaatttctccatgaaatgctacaatgtatgggattaaatatatacattattgatatgactagtttaaaactgttcatgacatcttacctgaagttgtatccctcctggaagacaagaatgtaacaaatattctgaaaaaacttcagaaagtatattattattggaattataattatttgatgaaattcaattagtgtttattaataatgagcttgacatagaatgcattatatagacggtcacccaagtgtctaatcttacacactaaaatatacatgctgggaaatgaagatagggaaaatataatgatggcagaacataacattaccaaaatataaattgtctctagagattattgtatcttccactgttccacagaaagaataattttgatattctattgcacattgatagtcatgggatctcttcaggaatttttttttcttatgataatgcttgtgttctcgtcttacaaaattttaagaaaatttcttgtgaaaatgtgctactctctaagacaggctactgtctaattgttgccaagcacaagctataactatgataatgagattggcttatttcctttgtgtttgtcattcagacctgttttaaaatcttgcagttttagatgtcaaatagtctgtgatgtaaaatcacctagatgacatgtttccacacttgtcatcaacatgaaataatcatatttcagcacagctcctctgtcatatgagaattatgtgccacagaatccagatcctggaaaactacaggaccctaatgtgtgtgttatcagattaaaacacctgaaaatttagaatttatgcataattagccatttcaaagacttcacagaatgaaaataatctactgggcaaaacataatatatatatatatgaaatcaaacattgaatgaacacatgctttgtgtcaggcattgctctaaatactttaaatatattctcatttaacctttcaaattctttatgggttgagtactattatcatttctatgttatagtttgtaaatagcttccagaaggtaaggtctaaagtcacattgctagtttttggttgaaagggactctgaacccaggcaagccaactccagggtttgcacactaatgtatagctatacttttaagaaaactatgattactagatatttcaattatatttcaaaggtcttaggtaagttaattgtagaattgggataatgtcttgggttcttggagtacactgcaatcaccatgttcagctctttaggataatatgacaaattctagcctgtgcacaactgtttctctgccgggtacattttcagctgtttctctccttaacctctgcaatagtaatccaatcaccctgagattcctcataggtattatagcacagcattaaacactagccagtttcaccagggctttacaattcttgttatgctctatctaggagaaaacagaaccagtttttttttcttttaacttttcatcactgatagaggcctggtctgaaagttttttatcatttgaacctacagaactggattctagaatttatagtgcctgccaagttgtgtgtaaccctcgtgctggttcttgggttctaattgctgctgcattcaacccaacctcctggcaccccatttggacattctacatggaacaatcaatttcccaccttagaatctaaattctgattattttaatccgtgttggctctccttgtccaggctccccctgcccatggttctgatgtcccaaaaggctttcatacagaatgctgctacgtagcaaaataacttttataatagttcttgacttggatctgctatttggctgtaggtctgtgaaccctaacattacctgcaacattatatgcatgttcataagcacatttttttttttctgagcagggcctagagttttaatttttttctttcaaaggtgtctgtaatccaataatacttaaaaccactgctactaacagatacaaagcaaaagagaagggtggtttcttgttttgacacctgtgttagtccattttgtgtggccataacaaaatagcacaaagtgagtaatttatgaagaacagaaatttactctctcaaaattctggaggctgtaagtccaagatcaagactccagcaggttcagtgtctctgacggctgctgtccatttccaagatggtacatccttgctgcatcctccagaggggaggaacactgggtcttcatgtggcaggaggctgaagggcaagaaatcctaatgctacatgaagcgttaatccccttaatcccatttacaaggggaggagccctcatggcctaaccagtttttaaagtccctacctcttaatacatcacattaaacattaagtttcaacatttaaatttggaattttgggtagtatatattcaaaccatagcaacccctgaattaaattatttaaacataaagcaatatgttcctgaaattactatttcacatgtttaatatgtgcatgtgactagtggctaacgtattgaacagcacagcttatagcaataagtgatgttgtgcaagtttaaaatatggtggcagagagtaatattgcaactgggcttttgattgtttgtgagaacccagtattaacagtcatatgaacagtagagtatgcctactaagaaggtatagttaaacattattgtacatgtttgagtctaagaaatgctagctgcatttgatctatatcaatgccatatgggtttttaaaaatcatgtattgaatgtgattttcaagtggttcaatgatgtaacagtgttggtagggtgatactttatagaaataaagtaaattgtgtaattgaattcagtaggaattcataagttctgaaaatgtggtaatagtctacaaaccttgaaataaagtgtaaaatatcacagctttaaacaatgctggaattggtaaatattgttatgaagacagtaacaaaacatactaaataattgataaagctataaaaacaaatatgaatatagtatgttataagtagtggttactagagagcagatgataatatacattatatttaaacatatctctatagagtcaacaaaataaaataaacattttggtaaaaattacgtaagcaacaaaatgaattagagtgtatctctgcctcattacaagtataacaataaatattttacaaacaactgttagaaatcatgtgataaaataatagacgttaaggaactgcaatattttcatccatattagtaaatcaggagcatcaggaaaaaagagaataagtgttaatcaaactgatagatcattggatatccttatgaaggttgtatttgcagcatcaggtagagttcagctcttcctgtgacgggtaaagtctttatctctatttttctcccaagtgttgaccttccaagatattattctgcaaatctcttagcaagcacatttctgacttgtacagcattgagcttaaatctgtattggaacaacatttcaaccgtatttgagtcatagattatgttagtaaaatgtttatgtttaaaatttttagggaaaagcaccattctacttctaattcacagtgtaggtgatgacttatatttgtaggaaaagtaaagctacagcgcggtgttttctctagtattgctctaccgtcagagagtattaccctattattgttctctttaaatacagggtaatatttggctgtgttctataatgccaacaaatacttcaccttaaagggcattttggaaaagttcttgtcaagattggttgacattattataatcaaattaaagttttccttgaataaaaacatcatatactgagagaaaagaaaaggatatttgacggataaatgttgcttccatcttgttaaagagtctttaccattccttttataaaaatctcagtattaagagtcatggtctctttagaacattgccttaaagttatctgtaacaataagcattcctatgaactattagttttaaatagagtgaaaagatgtttctttcaaataatttttctttgttgccaaattcccaaactttctttcagtcaaaaaaaaaaaaaaaaaaaaaaccacagggcaacacacacacagagacagagagggagaagagagacagagacagagagagagagcgagaattcacagagggactgaatgaatgtccaagatcttgatataacgcaagggaaattgaactgataatcttcacctgtttgtcctgtcagtttacaaaaatataggctttgagctcaggcaccatggattgggatcccatctctaccttttacttactgtcatttaaccactataggtctcagttttcacaccttttaaatgcagagaaagtagtaattccatcataaaggcaaagatcttatgccttatttatcttttcctagaggtaagtactctatctagcatataatatgcatgaaataaacagcagttaaataactgaataaagggccgggcgtggtggctcacgcctgtaatctcagcactttgggaagctgaggtgagtggatcacctgaggtcaggagttcgagaccagcctggccaacatggcgaaactctgtctctactaaaaatacaaaaattagttgggtgtggtagcgcatgcctgtaatcctagctactcagaaggctgagacaggagaatcacctgaacccaggaggaggaagttgcagtgagccaagatctcaccactgcactccagcctgggcaacagaacaagactctgtctcaaaaaaaaaaaaaaaaagttgaagaaaatattatggatatttatgaatataaatattcataataaaataaaatgtttatgaatgcaattgaataacataaccaacagatgctaggacaacagccaacaggtgactatttggtaataatgatagttaattatgcttccacttactaagttattcttgttaatttaagcatcgtttaaactacattttgtatgaaatgggtgtattattttatttcttacattctacttcaactggttatcttatatttatattgttgtgtttcagctagatatgctgttgtgttagaacatacactgttatacacgatatatctagaacctgtattttagcaaactttttgtttcagaaagataatagaacttttttcattattatacataaagtatgctttttttctcctgtgctaaaacctaaagattctgctttaattttggctaaattatttttttcccatcactatctatatttagagcttacttctgagttgtagttggaagaattaaatgtgggagagtatgttttgccaaacccaatcagaaggactgcctggactctgtacatgagcctgttgtgacctgattctcatgtattctcgacacaatgctgaaggtccaaagccctggcacttctagggagcaaatacctccagagttgagtaaacctgaatcaggaacactttctctgactgaattctacctcaacaatatgcatattcaaaaaagaaaaggtaacatccttggaaaatatgtgctgggaactgccatattcaaaatacttctaaaataaatggagagtttttttttttttttaaaccaggaaaaaaactcttgtgaagaattagtttctaagtttttggtttctaagtagtttctaagttttctttgtattttattgatctcaaatgttgttgggttttatacatcacgtaacttttgatgttacttacagaatactctaattctatcattagatgtgtttatttctgaaaagtgagtgattgttgaatagaatcccattagcaacattaatgttacaatttaaagacaataatttcttgtagaactatgacgaggatacaagttttgcaatgttaaacatttttggaggtgtacttcccttgagtgggcacagttttagtcattttgatctatttttaagcttcagtttgaaaaagtcatacctcatttgtccttataaatatttatgtcatcttataaccaaattaactcctagattttcatttgaaataactcactttggctgagtgcagtggctcacgcctgtaatcccagcactctgggaggcctaggtgggcagatagcttgagctcaggagttcaagactagcttggccaacatggtgaaacaccatctctcttgaaaatataaaaactatccaggcatggtggtgcatgcctgtaatcccagctactggggaggctgaggcacgagaatcacttgaaccctggaggtggaggttgcagcaagccaagattgtgccactgcactccagcctgggcaacagagcgagactctggctcacaaaacaaacaaaaaaacctcacttcaatagtatacactgcaaaagcataactataaaatggaataagactttatatgttttgcttgacattttatatgccttatatataactttttttacttaaatgagaatagaatacaatatttaaaccaatagcaaggatggactatatgtacaaatcttcactatgagcttcaaaggaatgtgtactaattggaaaaacagaaataaggctagacatagaggattctgttatgtctcctccgagtgactaaatggcttcacaatattacatatagaacctgcagatgtagcccattattgacaaatattatggttattttgatataaatattttgatattattttggttattatcattttggtatcatctttatggctcaaataagttttccaattttccttgaaacatctttaaccctccttaaacatccatttataagcaaagaagcatatcgtctcccattaccatgttggtccaccttcagaacattaaaaataactcattaatgtagtcttccacctaaagagttcttctctaattttctttaaaaagttctttaataagttgaattacttcaccagttaaattttaatgtatttgagggcgaaccccatattcttcttttttttagtatctattatgatcaatgaaatgtttctgtttcattgattatattagactttttgttcgtatggtgcctatttaaacactgtattaatagcagttaatatatattgaatggttaacatttcccaataacgttctggcatctgtagtaactgacttaattctcaccctaatcctttgagatcacacctattttacagacaagaaaaccaataagaaggattattaatttgcccaaaaccaatcagctattaagtggccatactttttttgaccccctagagtctggttccagggccccatgcttttcactgccttagtgtttctaaattcatcttcctaaatataggacaaaacctgaaccctcctgaaagagcagtataaagtacaaaggagagagaaaagattgagcaaagggaataaaactgcgagtatgccagttgagcaagccacacggtaatttaacataagccacctgaagccagggtgaaaatcaagggtggaagcacacacacttcttgtgatgtgacaggatgattcataccagtcacttttaaagcactgtgtaatgagcagagtccttagaaacatcttagcatcagatcaagatactgctattcctcatactgattgatctttactgatgttttagacattatattttaaaaattctgtgaaagtgattccacgagggcattaagattgtgcaaatccaaatatatagacttctgctgcctttattaaactgaaagaattttaggaagcctagagaaatgtgatgaaaatgatgatgttggtcatggtcatgatgaagaatcttgccagtttactagcatcaagtataaattacaatcttttgatgtcagtgatgttattttagagctcaggaaactggatcttggacaggccaaggggcacataaggtcaaagagcaagtaggtccctgaagctcaatcagcatctagacccttactcaaaaatctatactcttcatccttacactatagattttttctcaaatcggaattttgaaggaaaataactacatgagaaattaaccattatactctctagtttaggtatgtaattgataattttgattaaagacagatctacaagctatccagcaggtgggtggtaaggttaacattttataacagaagcagggacaaatattgaagtacttacctacttcacctggctctactggaagggagaagataccaagcaaaacaaaattatccttagaatgaagttctggtttatttcaacttgctattgttgttattgctggttttaacatgtgataacattagtttgtttgggctgctataattgaataccatagattaggcagcttaaacaatagaaatttgttttcacacggttgtagaggttagaagtcatgatcaagggctttggtttctggcaagggctctctttctggcttgtagatgtccgtcttcctatggcctcatatggcttttcctccatatgtgtgtgcacagaaagaaaaagagtgaattctctcttgtctgttcttataaggacgctaatactgttggatcagagtcccatcattatgacctcgtttaaccttcattacttctttagaggttccatccctgcgtatagtcacactgcgggttagggcttcaacatgtaaattttaagaggatacaaacattcagtccataacaatatgaaaacctcaacttgtctctaggtttatcagaggctctctaaaagctttgttaaacctcgtagcatggagtcacattgctatctatattctcgttgtaaatacacacatccagattcaagttgtcaattgcttccaccctttaccacctccaagctattcttggggccacattctctcgctttggctcccagagtttcaggcagaaaagagagtgctattggttgccacttctcaagccctccagtaacatctacattcaactttgcctcctcctccaccttgttatgaattgcaagaccccatgaaaatcaatggaacacatcccttagaaaaagaatggggagccctactctagaacttcactaatattttgaagagcaaattcttcaagggaatggtcaaaccaataatttctgcttctcagaaaatacttgtcacaatagaaattgaggtttgataatacagattctgtcctaaaatattatgattcctttggtgattaatgaaagtaaactatcacattaacattttgatgtgatataactcattaacatatagtcttatgaaaaaaattattgatttttacatagccatactaaatattaaactcactactataaaattagcttattgtttaattattccacaaaagaggaatatatatttcagatcattttccattttctaaaatagcccttttcacatatttgcataactgcaagtatgtcttcagcatccattgatttactgattttatatatttaaaggcaaattttttaggtatatttgaagagccattggactttctatgctttcagaaacagtagaatgcatattaattataataataatttatatcaatgctgaataataatattgaactttatattacaattatggttccaatatgtatttcataaatttctaaatcttaatacctaaatagaatgctatgaggcactggaatgtttaatacacaactaaattttctttcttttgaaaatttgtcaaatttctgtgactcaaatttgatagaagagaattctttgacctactggttcctatgattcacatacgaagggtgatacctatgggtatagagcaaatgcgtgttttatttataatagcaactttgttttagataaattcagtgaaataataaatgtatatgacttttttatgtgaatggttaaggaatgattttatgtttcttttattttacctctttaaaaaagaaatcatgtgtttgagagtttgtgcatttctatcttcttaaatattaacaacatttctggatatatggttatagaggtttgcataatatttagtcaaatcagatttatttatatgtactttagaagtattctttttaaacagtattcaactttctctgacatatgcagctgcagcaaaaaacgtttactgaaagataccttggaatcatttgtgtacagagtttaaaagttaatgttgtcttatttaccaaaataaaataagaaaataaagatttgatagggccagaatgttaattagactagaaaatgcaactttttattctgtaaatagatcagagtgtgttaaagcaatctgaaaatctgaagcataaatgtagaaaaaattttaaacttctttactctttgttaactcatcaagttgaaatgaaagttaagtgcatttaaaggcattttcagtagaaaacagcttttctttgggagctgctgggcaaacatcctttttttaatgaaatagatattgtatatatgataaaggtaaataaatacagataaagcacttagatgaaaaaaatagactgcaaacactgttatacattcacttgtaggttcttaagtcattttttttgttcttttgttctgtaattgattgctagcaccccctttaacccaccttaaagggcaagcaggaaattcatgttttcgttcatcagcccatccctctgaaaagcgttcgatattaaaacagttttcaaggagcaaaagcagaggaaagaagaggcccagctagactgtagcaaggttagaagatacacgcaagattgcctgccacacacatcgggtcttgttcctgtccagtatttgcatggagatatcaagttaattagggtaggactctgttcttcgctttctatgtgaccttttattatatctgtggctctctagttcatatggtgtcataaagctatgggaaagtctttctagtgtttgacacaaactgcaaaagaaataagcattgatatttccctttgcctgaaggtttttacagcagcaaaatactgcagaggcaaagttgatattgtggtagatttgctgtgggtgtaagaatgtttcttttgtctttcggctccccgcttcccccgatgatgatcaggtgcgacctagagagttgtggagaggaatggggtattggttggggagggggtgcgggttagttcaggaggaggttacatggcggaattcccacgaatgctggcgaaggatgaaaaagatgaagaaatcttgtttttctgaacgagaggattctctgcatgacttccccactgttggggtgatgagctttcaggctgagattttattaacaattcatatggagattgagggcagtggaggagcagattctcacataaacttgatctgtccatgaatgcagttctctgtttgccctgaccctgcatggcttaagacactgcctgtgaggccagtgtgccagacacaaagaaagaaatgaaaagcaagcacattccaggagtctgcacaaaggagcccggccgtttctagtcgtctccccagagaggatcttatctctgcacagccaaaaacctctaaaatgtttatttgtgtacttaaagttttaaaatccatgtggctgttcattaagcaacagtcaatagagaggttttgtgaggttttaaaatgttgttttctgaacttgttgaaactggaaaaatatttgcaagggtacattttctgaagtttagctttagaagtcactggccttgagttgtttttactttgtcaattggtaggtagcctgcaaaatgagtcctttccagctttgggagaggccagaacaacatcttaaatcttgatttgacttcgtaatacatcctgacactgcaagctctgaaacttgtggcagagagttaatgcatgagacaaaactgacctgggatcacaagtggacatcctcacgctcatgatcacagaccacagtgttacattagaaaaactatgggagaagcaagtgcagagaaaagtttgagtgagaagaaagagtgagagaaactaggaacttttattataatgtttttacaattattggcagttcactatctctagaagcattataacaggataatgacaagctctcacaagacatttctctgtaacttaatataataggttttattgtttgacaaatgcattgtctgaaagtatgacatctttaggttcaggggataaaaactcgatatacataattctgctgctcaaatacatgtttccacagatacttaaaattcagaaaatccagatacacaggctttttaattttgcatatgtgtttagctgttcaaattacttcaaacttttatggttcattaattaaataaccagtagaggaatgcagacaaatgccattaattatgataggttttgttcctttcattttatagtggttttatttccatgaaattaactgttgtacttaggctaattgtcagtaattggtgacaaaatcacttcattgtttttctatagcatgatactaatgaggatatttgcaatattggcccaaccatgtgtgtattttaccttctgtgtttagtcagtggtagataatatcaaatgcaactttttaagagaaccatgagataaaacatttctattaataattaaacaagtcttttaaacagcctgtcataaattaattttaaaacatcgagattgaaggaagcttttattttaggtttagttggtttcatgaaatatcaactaattttcctgatttgaattgaattgttttggaatcatctatgcaatatcgcaattacaaatctcaactgcttagccacatgtatttttattattctatttgtgtaggcaatgctaaaattagcattgctaaacatgcttttgtgaggtatcacagagctgagtgggattgcctttcttttcacacctgatggttaaattctcataatatatagcaatattacttattcttgttttctaacagtattttcctgtttcattttgccacatgaaaatgtttttcaaaacattgtatttcaaatgaatatatatgaaacagttgagatcatgaaagcttggttttatgtatttttttcaacattaaaaaaatatacttccatgtaagtaatgggttataaagagaaaaagcagtgggagagtattccattttgtgaagtgagatttaatgccaatggcagaaaatattgcaacactacttatcccattaaaacaatcacagccaatactgctttgctcacttcgttccttaaaagaattcttctcaatagattcccctatgatttttatgaattcgtaagttacaaaagttttctagtactttgaagtacagtctttttgcttctttttcttattctaagatgcttttaccaatcaagtgccattttacagtttatagcccactctgtttgttttaaatgcaaccataatgtataccttagagctgagtgtctcccaatcatcctgaaaaaagtttttacaaagcaattagaaaaataattgcctattaaaaggtgaagattggtttgagtagggagagcagaaactgaactctgaaattgaaagcattcattgttagaggaaacatatgcaccaaatccaaaattaaagaaaactcacaaaatacgtatcttggcaaggggaattgtttgaattttctaaagctgtcagtccattttctctactttttttccggtaaagaaaaacttcaaatggaaagcttcaccttttgtacaaagttgaaatgttttattattgcagaattgttctacactgtacaaaaccagaacaattcaatagcttccggggggccaggggatggggaaacaaatgagaatctttccatcattctagaatacccatagcagagcaaaaataagtataaaaatctatggtcatttccttgaaaaaaagaatcttttgattacagcagttatttgaatacccattcaggctcttttgtgacatgtaataagtgctcttctcccaaatgaaaaatactcttagggaacaaaaatcaaacataaactacgttcagatgctgcatttcaataggtgaccccataggattaagcaaaggttatttttcttttttgcatgtgctctaaaaaataaattccccagagttaaattttgtttgtttgtttttcatcttactggtgtatttccaatatgttttcttgctttttgtcagtttcaaatatatagaatgtgaaaaataaacaaggcgggaactgacttcaagttttaagagtgataaagtattgtgaaagttacttagagaagatgatttttctctgatttatcctgccatattatagactctggagaatacaataatatggaggtttttttctctttcttgagtattctaactgttcaaggaaaatactagaaagaagtaggactctggtaatactatgagccatatccatgggcatctaaatcctgtagaaaaaaataataaatacagtttgcttctcacttaatcatacttgacaaccatatagacactgctggggccatcatgagtagcaggcggtatgtttgactgttttggccccagaagtctttataattgtaatcagtttcttcatcagtccatgctgtgccaatacccctaactagccatagtgtcattttaaaaattaaaaataacccacattcaataacatcaacaacaacaaccacccctcagcataaactatgttctctgtgtgaactcacagtacggagcagttgcatccaacccctgggctctgatttacttggcacacttggggttaatcaaattcccccactgtgaggtgcacacacatttagaggactataacacactctaatgctacctaactctgctgtcatttttaatattttcatgagttttttttaagtgatgtgcatagcagaaatagcctgactttttcttactgctaaatagagtgcccaccaactaaagcaaacaacaataaattaaataaaaaatgatcagatgtagaacatatttattccaagatagttttagtttctgttgcccaaataagtttcacattctatgaaacttgccttttcccaggggttaagctcctgcagcacttgagatagtgagcaatggcttcattaaaaaacataaagcataacaaaacgatgtggtaaaccttggggtgcttttgtttttacttattttagaatgtactaacaattttgtatgcctcacaatagaggcatccatgtataaagacttgtaactactcttattatattcacattttctggggccttaatttcatggtgaacaatatcaatctgtaactggggcaaatttacatgacatcacatacaaggcccagcaggtcaaaggtggatgaaacaggttcactgctgcatgccatgtgtcttacctggacaggcagccatcagctcctgcttcaggtgaccactgtctgcaggtaaaaccaaactctgtacattttgctcttagtgccttatgaccagttgttttcactcataaataatgtttgaattgtaagctcttttgctctggaatccagaagcaaccagtcactaatgatcattttgcaaactacctagtcatctaccagctaagaaaataatggcctctcactctcttttgtgtgtgtgtgtgtgtgtgtgtgtgtgtgtgtgtgtgtgtgtgtgttagagctgttagcattcatcaacaaccttagttgtccctaccaacataggcttcatcagaaacttttctttttttttttttagtagcaaagataggctacttaagattttatctccaagtatgaacatagaaaatataaaatattcaagctctaaatcatactttggatataccttctaattctcactttgaactacctgtgataagacgtgacatttatgttttgtcatattattcaacatataatttaaaaataatttaaaatcacatctaaaattttaaaagaacttaggcactaatatgttttgtagtcttacattattatttaaaataataaaagagtaaaattttatagagtatatttgtaggtacatatttttccttgaagggttacatgcaatggaaagaagatagattaagaaagaacagtcacctatatgtaattaaatttcaaaatgatatagaaaaaatttactggaatgaagaaaaaaatctgccttttagacaactacatggaaggtttatttttattttgtaatacggacttttgttcccggataacttgtaacaagctcaagatgtggagtattaaatgaattattacaacatatagcctagaagtaggaccgcattgtaaaccatcaaaggtataacacactaaaacaggccatgtgattgtggttaacgcactcatagcgagtgcaagcaaaccttaaccttctggatttttacatgttatgttttactctttggtttacttcttcctgtgatcaatacccgggcaaagccagagctcttcaggagaaggttgagattataacaatgtcagcttttgcttttagcggagtgatgaggttatcaataatgcattggagatcttgggaacctttgacatacacatatcacagctgccccacgtttatcgtaggacttgcaggtctgagctgagttgtcacctcatctgtgtttgagccagccattgatgcagtcagtctcaagtaatcttgggcacctagggaaagctgttgagattatttaactgaaacattgcatttgaggaagttatttaggagtgagaatacatctatgaaatggcttttattaagaagcttgttcaatattcctttaataactttttgtctccctagctcccttctaatgtttataagtcttgttgtttctgtgacaagtttattcatatcctaacagcttgtctggcagcagggttcgtgttttttacttgagctttctggtcacggtggtggctgagagtaatggagggggaataagtgggtgtggaaatgcaaagctgtctcttgttacattttatcgatctcattctggtgtcattcaattaagacagaaatgtgatggatagtctctgcccagattcctgggttgctctccatcccttgcagatacagcttttgtgttttattttgggggaagggatggggaaagggcacgggcaagtgagagaaatcaaatatgctatgtgatctgaattacaaatcagtgtctctctaaggatgctccaaaatgtcaaacatgccatgtttatattttcacatacacagagtacttctgttgatgtatgagatgggttactagaatttaagttggggttaattattgttgatttattttcaaagacctgtgagctaacatcactcttctaccagctcaagataattaaaaatgagccacatagaaaaatacttgagtccaactcatgccatttttgaagtttgcaaatgagaaattattttctcattttttttttatgagactgtgattctaagttgacctttctgcaaatagactttcaggctgataaaatgaaaatagtaggtatttttttttttagtttataaacaattcattctaattgttgcctatgttatcaagaagtgtactattgtgagtaaatttcagaatttaggactgtgtgaattctgatccttacccttgatgatgtattttcccttagctatatcactacctttgtttgctaccagtgttataatgagggttgtaggaattcatggatgtgagaggctctaaaagtaacagttcatgtatgcaaagttttttttaaaaagacattaaaatcgctactgcaagcacatataataaaagcaggatatgttcaacaaactcccttgcccttctcaaaacaatgccagattcaaattgagcattcagaattttctaatcgaggttatggcttctgataattaatccatactaaaagggagtatggaataaaaatataagcaggagttttaacattagatcaatatgttaatgtccaggctcccctatatactcagtatatgaccttgggaaacatgcatacagcctgtagtttaaccttaatttcattatctgaaaaataaatagcattgctttgagaattaggagactcagaatatgaaaatgattgctccatgcttatcctgtgtacttggcccacgggagacatccaacacgtttagttttattctgaatccccctttatggttttgacactgagtaatttggtcctataataagcttgctcagtcatttgggaaaggaatgtaagcaaagaaaaataatacacttgggtcctaccactgtgagtcaaaaatattccagatcctaattcacagaagctaatttaccaatctgtgtgattttttttagtgattttattaaaaaaactaattgtcattaaaaagttatcctaaaattttgtttatggaaggcactccgtgtgttttgtcttaatccaaatttatcagtgattttaaactatcatgctttcatcctaaaattaaagagaagctgctggttaaagcagttgtttactaattttacaaaaattatagggcacttggaaatgatttaggtgggaatttaactgataacccacattgtaacccactcaatagtgtagaaaaacacaaaatcttatgctgctggtatatgtcttgtaggtattgttaaaaactatacatatatatgtgaggtgggacctggctatctttatttttactgtttccttctgaggttgtaaatttttaaattggatgtttaaaaaaatcatcttcatgagacaaggcttaccagatatacatcaaagtataattgatatctatttaaggaaaatacatccataagacgtaggtagtaagtaaaaagtttttctacatgatccaaacataagacataattagagcatgtctgggaaaaaaaaggatgtatcctaaatattgcacatgacttttttcaatatatacttggtgtgtgctaagactgcttaatgcatgctttatgaaaacactaccaacactttggttgaagatgtaatgagaacaaatttctacactcacataatcattgtacactcagtaagcattactgcataatgaacatatttgtgtgcttgtgttgggaattaatgcaaaccattttattcatttcacaaagggtatgaatagttctccttgatgtgctaggataatgttataacttttcccagatagggtaggaattgcagtggtatgtttggtcattctcttatcctttgagatagttcaggtctaaatctgggtgtggggtgcttcttcactctcttggatccaagaaggtgctactgaaaagcaactttccaagttgtactacattccacagctaactgatggaattttaaatatttcataaggtagacttaaaaaaatcacaagtaactatgatttacagaatttatagaaacagaggctctagtttggggtcatacctaatacactaagtttcagtgttcaattccaggagaatacataaccaaatcatggtgacaatattgcctccccttaaactcttaaagaactcttttcgtggcaatttacaagatagttaagcaccagttgtcaatgatatatgtttttctttttaaaaattctttgctgcctgtagttaatattaaaaactttgttgttgtttgcgttctatttctttataggctttctttccaattagaatgtaagctttgtaaagtaaaaggcaattggagatgataaatgaaggttgaagtaatcatgctgaccatacttagtgcgctggagaaacagaaggttcctatattcgccatttttattttctgttcatcaaagaggatttaaaggaagatgccatcccttagaccctggcagttccttctcttcaacgtttaaacctccactttacattattgaactaacaagatgttctaggcattctattgcaggcaaggtatgaacaatttcaaatttatcaacaatcaaaatcatcaacaagatgatgttaagtttcataatcactctgcgcctatctttgtgtttgcaagattctgactggtatctacctccattggtttctctgtctttgtcttaatatctttcctgcatggctttctggctatagcagcatggtttgaaatactccctcagtagtccactaccatttatctcaaatagattgttcttttgaaacgtcaaagtattttttaataccttttttgttacagttacaacctaagacaacttcaagttgatattctccaaatgagactctgattcaatgaaatctgttctctctattagctcattttctctcaatctctatctctcttgcttttcacactttactcatctcttcctctctaattgtattggaaactctttagaatcctaacattggagttttggatatggcgggaatcttagtggtcacagacttcatctctgtgctttcacagatgaaggtcccaaggctcagaaaacctatgggagctcaaatctaagaggaagtctaggaaaggtctttgccctgtggaggcctctaggtgtcttactgagggtcaaccctatcatctggtcttagagtttgctgggcagagttccttgtcttatttatctttctgcccacagtgcctggcaccctggaggaggctaacgtatgcttgttaaaatagtcagaaaactttatgccatatctgaagatgtttttaacatatgatgagttaaatttcatcttcccaaatgcagatgctaattatgcgttctgagcatgagaaggaatttgaatgttttataactatatgttgataattttctctttatagagatctgttactccagaggaagaatttggggtcctgtttttctgtttctcctcagatcatttctagaaattagtattagcattaatattctcataatttttatattagaagaaggtacctccaagcttgttttctgagtaagatcctttttgagaataactgggtgtctgctacataaatttgacaagctattttggtggtgaaagtttaaacaatactctgctaagaatagaagatataccctcaaatcacacattgaaaaaggtagtccagatgaaacctagaaattcttcatgttgatcaaccttctcactatattcccaccgtagcattttatctttcctctcatcaaaatctgattaatctcttatgggctttttgttttgttgtgttttgttttcagtcattaatgagtataatgtcagccttttggctatcacttgaattacttagttgaatatttttttttttttgagacggagtctcgctctgtcgcccaggccggactgcggactgcagtggcgcaatctcggctcactgcaagctccgcctcccgggttcacgccattctcctgcctcagcctcccgagtagctgggactacaggcgcccgccaccgcgcccggctaattttttgtatttttagtagagacggggtttcaccttgttagccaggatggtctcgatctcctgacctcatgatccacccgcctcggcctcccaaagtgcgtgggataacaggcgtagagccaccgcgcccgtgccattatattaaatatggacccaaatttgtctctggcccccaagcacagcaagttttctaaaagattgctttgtcccagattgaattacgagcgtgggacagggcattggaataatctgggcaagtgggccattgagaataggggtaaagcaacacagccatgctactttcacctgtcacttgggaacaataattttggagtgtttacccataactaaagatgtctggaaaatatagacatgcacttctttgcttgtttcctgtcatgttatattgtaaagctcactgttttgagctaagccataaaaatcctcagctgggtccaagtgttccacgactgttgaatttggtcaggaagcttatttggtcattgtactcaagggtgataaaagtccttgaggattaactctcacataatcaagtttacaggaaaatcaacaatagaaaaaagaaaacaaccatggataaatgaaggatgtatatatttgttagctgatcaaaacattttctttccagtagaatagtgaattcaggaaatcatattagtgcttatatgaccattacagattataaaatcaaaataaattgtatacattaatcctaatgattatcaccagataactatcacctgaatttccagtcaagtgaggaggaatcaggagtctccaacatggttggcgggaaactcctttcaaatggactctgccgtcttgtcccttttttatcctcatgcgaattatcattgcttatgagtaaaataagtcaacggaatgcttggtatcgttcaaaacagataaaggtaactaagcaaaatatcatcacaaaagaacaagctagttagcaaaagaaagcatgccgcttatcagcatagatgtctgttcttgtcctctttgtttatcgatctgtctggttttattttagcaagtaacagtttatctagcaaagtttcaaatgcaagtaaaaaaaaactgtgggattagagtacctgtaattttgcttccagacttcacaaatataagaaaaagtccccaaacaactctacgattttgcaaactttctatattttggaagataggttttctgattttcttttatcagcaaaaactaatcaaagttgtcttaggtgagcactatgctcagtagagagtgacgtgagtgtacaaaagaccactttttaccttaagcagtttgcaatacagctaggtagaaagcatcttgaaatggagggaagactaagaattttaagtcagttctgaatgctaaaaaagtgatacaaatcaatcctcttcagaacttcaaaatagaattgggcatttttttttctacgtagcccagagcaatgagagaaagatatttggaggaaatgtgatttgagaattgttctaaaagaaagttagagacagacaaaccaacagagaaaaaaacatcccagagaactttgtatctctgctcccaatctcaggaccgtggagacgtactcatggatggagaaaatggacccacagaagattgcctcaggacatcacaggggttatctagagcaaaaaaaaaaggactaacattcattgcatgttctctggttgactttaatcagtggtttcatgatccaaatgaaattacatgtctcaatgaataaatatgtagctataatacaaaacaataggggcacttttgtattttgggcaggtgggtgagtgaaagtatgtagggaaacattattttcacatcttgtatacattcttgggaggtacctatctgccaacaccctttagatcttttttgatgtagactaaaacattatacattcaaaatgggagagagatgtataaattgtcataagaagtaatgacatgtgtgaaacaggcctcatattttcccactcatctactcctgaaatcctgctcctttccaatttcctgtctcagtaaatggtaccaacattcacccacccagtaactccagtgtaaaggcaaggtgtgatagatttctctttttttctgacactcacattctttctatcctcaagtcttgccaactttactttcaactctgttccagtacagtcaattccccatacccccagaactaccgctttttctgaagccactgtcatctgctacaatagccctctaactgatatttctgttttcattcttctccccctagagttaattttgctcacaccagttaaggtgatttttcaaaactgtaaattagataaagcttttctatagtctctcattagaagaaattttaactgcttaccctcgactgcttgagcctacattttgaagctgctgcgtatgtgtctggcttcatttcctaccactctcccttgcatatcatgtcctaaagacactggccttgaagatgttcctctaacgtgccttaatccttctaacctcagagactttacacttactctatctgcctgggacactcagccttcatatgggtttctctttgttacattcaggctaccactaaagcatctcttcctcagaaagacgttatccagcctcccaaccattacttccaactcattactctcatctcattatcctcatttgtttagcatcatggtacttgtcaatacctggactcacattatatatttctgtatttgtttgttgtccttttcctaacataagtccaataatagcaaaggcattgtctcttttacttaaccccaggatctagaagaattcagggcacaaaagaagtatttgataagtatttgttgaatgaatttattaaggaaagtgggacatagtttgcaagactttatctgaaggagtgaaaagttattttgtagccaggaggacctggattataatctcattttagacacatgctttccttctggacttggagaaatcactaaacaccccagttttatcctataaaaaatggaaattacctataaggctggtttgcagagggaattagagataataaacattatcaacacaatagttggccaataggagatgtttactgatagaataataatacaatagtgaatataagtgtaataaccccaggaggctgagacatgagaatctcttgaacctgggaagtggaggttgcagtgagtcaagatcgcgccactgcacttcagcttaggtgacagatcgagactccatcacacacacacaaaaagagtaataactcagtgccccgaattgtagccaggatacttcaccaaagaaacataaaatataaacacccaccccccaactcttcaactcattatcagtgacttctatcagactcttgaatatgcacccttgggaaatggagtaagaaccatagcttaaatcgtttaaactcatatgggacaaaacgatgaaaatatgcaagagggaacaatcttacattggaaaagaaatcaagccaatgacccaatatatctttttattatttcttgggagaacctgtatgtttaattcatggaattcttcactgtttctatgttgaaatacacttatgtgaaaattgcactcctattaataaaataggactttaaaaagcccaaggattttagtatcgaaatgtttctgtgcaatatattaacattcattgactatgtgaatccccacctgtacttcgtgtaaattaccaaaggtgccctttcctctgtgcacatgacacgtgtgcccttgccggtgtaattggactcatgcttagggcttagtgagaagagcctgggctatatttcaatctcactcaccaccctggccaatctccctttcacagggctcagtccaaacaaccatatgcaacatcctgtaaatgttagataatgaatacaaagacagaataagattccaaatagagtgaactgaagatagacaaacctcagctatgcctttcttccatcggaaattttgaacagcatgtagaataaaagagacatgtagtttctctgacagaaaaagcaattacaagcatgtcacatttaaatgtggatcactgattattattgacccaaactctaaaaaagcactattgtccaagtagcatgcttgtcaatattttaagcctaaaaactaatttgacaaagttgtagtaagcttagggtaggaaagggaggagttcatcaggaactgagtaatccctgctttttagagaatacctttggttttaaacttaattctaatgattttactgagtatcctctcctctgttggacatttcgagttgtagaaaaatgtatgcaagcagttttggaccttatggaagcaacacttaggagcaccatatcagtgtatgagtcactgtaaaacagaacacagaaatacagaagccatgacaacaaagaaagcaggtccaaggaggaaaaacctacatatcggcaggtggatcagaaaagttgcatgggaaaagtggactattgcattggaagcctgtaaagggcaggaccactctgtcatcttaactagcttggtaagcagatcctgggtttctgtattaaagctggtcctttgaatgaatgagagcactaatattttcagctggaggaaaacaacatgaataaaagtaaaaatggaagagtgtagggcctttttagggaaagtagacaatccactttggcaggagtgcagggtgtatacatggaaagatggggtgtgagttgagattggaaagatacgaaagtgttcacctgtagactaggttctaggggagtgtgttgtttttctattttcctattgttttccagataatatatttcttttgaagtcttttgaccataatcaagcctataatctatgaagaatgaattgccatatgtatgtagaaggtatcatttgagtcaaggagtgtgagaatgatatgtaagaggatgttcttatgtaatatgtaagagaagcaataaggacttaatgtgagacaaaagtgaatataatgaagatgaagttttggcatgacttaggaagtgtttgggtgaaacaacaacaaaaaaggaagcagaagggttaaagacaactgacattttgtgcctgagtaaatggaaaaatggtgtcgagttaacagattaggtaaagctaagaggttttcctagaactctggaaatttattaaatattttttcttaacgaaaagtgtaaactggcccataatgtaagcaaattttgactgagattcatggtagattcttagctcttttataattatttaagtaacattaactcttgtttattcattaagctccaagtcatcttatgtagtcatatatttgtgtatatattcctgtcttatcttatgtaatgcaatcagatttgatttgcaaatgtaaatgaactcatgtatttaatcaagaataaagacataacactgaataacagcccttaatgctggtatttgaatatctttctctttcagagattttgtatacatataccccttttaaatgacctcacattgctgatttttaaaatttttttttttttttttttttttttgagacggagtctcgctctgtcgcccaggctggagtgcagtggcgcgatctcggctcactgcaagctccgcctcccgggttcacgccattctcctgcctcagcctcccgagtagctgggactacaggcgcccgccaccacgcccggctaattttttttgtatttttagtagagacggggtttcaccgtgttagccaggatggtctcgatctcctgacctcgtgatccgcccgcctcggcctcccaaagtgctgggattacaggcgtgagccaccgcgcccggccaaaattttttattttgagataattttaggcttacagaaaagttacaagatagtgtacacagtttttatatacacttcaccttgctttcctaatgttaacatatgatgtaactgcaatccagtgaacaaaactaagaaattaatgttggttctgctaattgactttaatcctgtttctcaatcacttttataaaaatgaaacatatataaaaatacaaaactagctggtgtggtggtgcttgcctgtgatcccagctatttgggaggctgaggcaggagaatcgcttgaacccgggaggcagaggttgcagtgagctgagatagcaccattgcactccagcctgggcaacaagagcaaaacaccatctcaaacaaacaaacaaacaaaaaacataaatacagagaaaaataatatagtctactatttatgggcttggaatgctattttaaactttcagacaatgagaactaacatgacggattgtactctaaattgttagctaattactattaacacaacctacctcaaatgatcttagcactctgtaacagtctccttttgtgctatttattttaaattccaacaactttgaccattatagctgatgtaaatgttttaagtaatagattgcaaaacaaacaaaaagaaagctaaaaaatctgagaaaatgtattgctggatgtagaacagcaagtgtagtagaggctggggatactatcaagaaaatggtaatgaagatagtaaaaacagatcattggcaattaggaattgatgcaaattctttgacattattaagggaaatagtcatgtccctggaggctggaaagagtggccaacaattctgcaaggaataggaaaggaaatttaggtttggggaggactcgtacgttcctcgaatagaaaattctggagatgctgagtttccggcctggcatcaacccactcttgttggatttccagccttattttactatccacccttgttaaattccctcatccacccaattgctcaggccagaaacccagatgtcatacttgacctctctttctgtaattaccccaatctcattgatcaacaagtgctgttacttttacctcacaaatatatttttaaaccatcccattctgtttatctccattgctaccaccctagaatgcgacactcttctctcacagcagaactattgcaataacaccccaaatgttcttcttcagtttttaatccttctctttctctatcctctttcccatagggcaatcagattgatatttttaactcatagatctgataatgtcattcttttcttaaaaccttccgaagtcttttcattgcacacaaattgaacttttaaaagaggtgcaaatgtcctgtattaactggctgttggtcatccctcttgatacggtttgtctgtgtccccacccaactcgcaccttgaattgtagtttccatgatccccacgtgttgtggaggggaccaggtgaagataattgaatcatggggccagttccccccatcctgttctcctaatagtgagttggttttcacgggatctgatggttttataaggggcttcccctttggcggggctctcattcttctctctcctgagccatgtgaagaagaacgtgtttgcttccccttccgccacgattgtaagttttctgagacttcccagccctgcagaactgtgagtcaattaaacctctttcctttataaattacccattcttgggtatatctttattggcagtgtgagagcagactaatatacctctcaactcatcactccttttgcctagatgggatctgctgcaggcaagatattcccggcctcagaagctgaggggagaaccttctgttcttccccaccttcggcttgcattcctccttcagcatcttcttaaggacagtttctactgcacagtgatcaaagttgcagaggggtgaagtgtggatatccaggaacccccattttactgttactgtctttactgcactttccactatccagggagggtagtttatgccctttgggtgcttttgggtgcgtatcagaggaacccactgggaacattcgactgtacttcctatgtgttgggtaatagagtttcctctcattgtgtgtcatcctcagctcacctttttagggatctattccacacaactttctcccttatgatgtccagtatccttccaggtgttctgttagagagcttcttttcatgcttgggaacacaaatatggctcacaggctatattcatctatttttgcactgacgaattctgggaatttaagcagattatcaacattgtaggaagctcttcttgaatcgaaggctgaagcagttagctaatccaagtgtgacatttacattgtccaacaggattcaaagtcaattccactctgtcttcaaacttcagctccccaagtggtcctactgaaatctctttcattaaaattgagtggaaaggcaggcccaatgctccccaaagaaatcttcctcagaaaaccctctcacgtctcttcatttcaggccttatatagtttcaatgtgttcacagccacctactttgaaattcctactttgccacttaatacctcctatataatggtactccaattaaacacttttaatgtaatgcactgatatatacccaaaataaataaaatcttatataaagtgacaactttaactctgattttaaattagacttatcaaattgaacaccaaaagagcatttcagtatgtaattattggtacagatgacccatgtcaaaaaacttttaaattaaagccaaagtatctaatgcacttagaaaagtggaccatcgcggggcgcggtgactcacgcccgtaatcccagcactttgggaggccgaggcaggtagatcacgaggtcacgagtttgagacccacctggccaacatgctgaaaccctgtctctactaaaaatacaaaaattagccgggcgtggtaactcacgcctgtaatcccagcactttgggaggctgaggcgggtggatcacgaggtcaggagtttgagacctgcctggccaacatgctgaaaccctgtctctactaaaaatacaaaaattagccgggcggggtggcatgcgcctgtaatcctagctactcaggaggctgaggcaggagaattgcttgaatccaggaggcagaggttgcagtgagctgagattgcaccacggcactccagcctggacgacagagcaagactctgtctcaaaaaaaaaaaaaaaaaagaaaagaaaagtgggccatcaatattaagtacaaaattctacccttaagtgtattaagcattctttgtagctttattttcatcttctacatgattaaacataaatttccaagaaggggtacatctgtaaattagactttgtaaaggagcaagatacttgtttcgggagaagttcagtaaagggaagccaccgttaaaaatgtcaactattgtatatccatggtaagtttgaaacatgttgcttttaatcttgtgttctaatagccagaatttacagtgctgcaacaatttgtttttaagtggctggaaaaatgtagtgaaacttgttattaagtatcttatttagcagaaacaccttgtaatttgtcttaatagttgtgttattaatttcttatcctgcttgggccacagcctattcagaatgatctgaactgcctatccaatctttagagcatttaatgaatacattttatcttcccaaaagagatctaaacagttaacttaaaaatttttcttaaaaacataaattatattataattgaatattcttggttgttaagtagaaaatagtatcatgtctaatcgtaacataaagaagcagcatacatgtatgctactcaattcgtttagttgctagtatactgaaactacttgagtcaatccttttcatgtataatatgatgcccttaaattttgtggttgaatacttagacaaaacatagaattaaaggaaataatatcattggtgaattattttgccgtataagtaggtaaactcagaggacacacctgttcttgactgagaatgttaggtatatatttgctaccagaatcacatacctcaaccaatagccaaattgacctgttagcattaacctataggaaggaaatggtttcatttgctcttgagaaaaaaatcataaaccagtgtccgaagtatgcaaatttttcagttaagcaaaatgagaagaccagattattcaccaagtaatgccacaaggattgtttatgatattgttaataattattgcctaatatattgggttgcaattgatggtcctcaaatctaaggagattttaaaaaatgttatatcccacatctcatttctgagagatggtggtacctcgggtgtctaatgccttgggaataagatcctagcctctcctaatatgctgagtgcctttctgcctttggtccctcacacaagctgttccatctagtgcagaaacctggtgtgttctgattcccataacggggtcattctcattttaaaaactcatttcacgcattgccttctgttgccttctgaagaccttttctcctggcctttcctgaccattctgtctatgcaagaactctttctcttcttcattctcattattctctatcatagcatataatcctctgatcatttaaaataatccatattgcgtttttagaagcttgaacattgctaaatagatatatagaaaatatatgttgaatgaacaaatttccttcaaacccaggatagcataaaggcaattaaaaaatgttagttcggccgggagcagaggttcctgcctgtaatcccagaactttggaaggccaaggtgggtggatcactcgaggccgggagttcgagaccagcctggccaacatggcgaaaccctgtctctacaaatgtacaaaaattaacctggtgcggtggtgggcacctgtaatcccagctactcgggagactgaggcatgagaattgcttggacctgagaggtggaggttgccgctagctgagatttggcactgggcaacagagtgagactctgtctaaaaataacaataatatgttacttgaatgaatgattggattttagaccaaaggactatttgatgtaaaatgttgtcaatgtctatactagtttatgagttacttcagaaatgtcttttgagagcaaggcctctaataaaacatcatatcccccaaagaacagttgccaatttattgcaagtttttatagcttattatatttatctttcaaaccatatatatataaacatatggttgttatctgactgtctggaagaaataatgctctctagaaatattgtcatgttccaactttcattcaatgttttttaaagtaaaatatgcttagagggcaatagttttccatttctagaacaagtttcacaattatatgtataaattgaagtgtattggcttttgatagcaaaagctataatactacaaatgtctaaattgtattttgacattattaaatataaattgagaagtgtgaggcagtgcactgggctcaagatttgaacttgaggctttgctttaaagaacaatataaactaagatagattttttttcctaaaatcacagtgacatgtattttcttggattagtgaacagtgtggctcatagatggggttttacttttagtccaaagcaacaatgaaagcatataaagttttcattgcctatttaggatatattataagcatattcagcatggggctataattttgtgacataaaatattatttataaagtcttgacatttaaaaatagttttaaacactttctttaaaaaaaacattaactcaagctcattacttttaccaaaatgtagtatagctaatggaaaagtaatacaaaattatgttaattagattgttttaaaaatcccttcaacatggaaaagtatcatgttttatgatttgatatatgaaactgagcatctgtgaacaaatttaattttaaaaagaaaagtaaatcatatttagccctctttttttcaaatgttagagaaaaataaaaaagctgaggaaatacagctagtgatttctgatcttcctttaggaaatcctgacattccagagaaacttggatagactctgaaggattaacccatttctgacttttcaggaagtttatctttcatttaaaaggatatctgatggggtgggatacaaaacttaaaataaagaatatgttaaatgccatctcagggatgcaagtttaacagcggtggtattgggctttagaaacatataaaaacatgacattaacataaaaaaattacaaaaaaatattaaaatgagcatataagtgttttttgtttgtttgtttgcttgcctgtgtataaacacgaaagtggtacatctctcatttaagttatggcccatgtacttgaaacaatttttttgctttctaagtgattgtataatgaatggcctaagctaacatttactttagcattcactctgtcctagtctatccgtgtgtcagctgagttactgtcagaggcttgcttggcttgtctatctctgacctctgcattctgaatttgctctgatgaagttttgtggcctagagcatgatttctgcaagtcatctgtgagtgtggcgcctgctcagtctaaggactagagtctgatagatcagagagaggcaagaatagactcagatgccgtcagttttggaggccaatgaaaagaaggaaacaaaactgaacagcagctgtgttgaaggctgtgcaaggccatcagaaattgggttcttgaggtggattggaggagaacagcctctggatgtctgctgggcagtgacgatgtgtctggaggctttgacattggattcattaggcattgctaatgtacacaaaaaatgtagcaaaaatgatgcctgtttctgggtgagaacatctggagcaccatagaagatgtgggagtaccttcacgtctcaggcattatccataggcttcgcttgaaaaaagttcagtttacttcttatcactagaaagagagtttcactaataatagttattataataaacagattattaaaagatgacagagaaatgtgacattataaggttttgcagaaagaataaaatattaaagcaaaatttgaaattgtttttctaagtggataaaacttttccaaactccaaaatttcaggatcatatgatttgcattaaatgacatagatttttttaataaaaccaccaaattatttaatttaaatttgaattattcctcatctatggaaggagcatactgcattttaaataaggaatatatttcaatattataactcagagagctataaattgtgattttcttgaagacattcattacatgttggagaaaatcatgagactgtaaattgaaatgtttaaaactgatgtgaaaaaggaaaaaatccttatttctaaaataaagtgagggaggaatgggagacggtgaaagtatataaagcgtaagaatgaatatgttccggagatctattttacagcatggcaactagttaataataacgtattgtattttgtactcaaaaaattttacaagaatagatcttaaaagttctcaccacaaaaataagtatgtgaggtgatttaatcattgtacaatgcatttgtatatatcaaaacatgagactgtatactataaatgtataccatttttaaatttgtcattctatcttaataaagctgggaaaaaataaaataaagggaaaataaatcattgaaccaccattagtgttggtatacagtggattatctgtgctttctaataatttacatatatgaagattatcttacgtttagtgcttaaaaagaatttaaaatagtgattctattatgtgtaaatggagtatacagtgggcatatttcttttgtttactgggatatgctttgtgcaagaaaaaatctagaagcagtaatcttggtcattttgatgtaaagtaagagtaatccaaataaagtcattttgctgagagatgagaggaagctggtattttaaataaaggatttcttatgctaatttcaaggtagaagttttggtgtgtgctaattttgcttgaaatatcaaaatggctatgtcatattagattaaaaatagaattctttctcctatggtttttattgtttaaaaaggattttttaaaatgcagcttaaatgaagagagtactctccatttttggttggatcctacattgcaatactcatttaggcatatttgctttaaatgaccaggtacactaattaaaaagaaaacaatttaccaggagctgtatcaagtacagccctgcaaacggtataagctttttccgagaatccatattgtccttggacttggctgttgtattatactttaaacggaattgattgtatggttgtaatgaaagtagcagattgatttttatccagtgttacaaagagtaaatagaaaaatgttcctgtcttgacctgcattcgtaaccaatgggatttgctggctttagacccaatctttaataagagataacatgcaaatgtaataaaactggcttcgaagtttaaggatcttttcaatgctcatcaaagatgtttgttgaggcatttaaatgtgttgtattgattagatcacaatcacctaggaaatgttactttctttaaatgttattcataatttattatgtaattagcattcatagagttgtgcctttatacacatattaagattattgaagtgcgggttatgacacaatggtataccttttaattgtccttaaaattgaattgtcttttattgttatttaagcaaatgatgatggtttaatgactgattatttgtgagtaaatttttacattgcaaaatattagagaaaggtgtaattggcttactatagcaggatattgtagcagtgtttcttgaagggtctattcctgctgaattcagagttattgcattatttattaaaaactgaaatacttgtttccaatagtgaactcagtcttttttctccaccttttcttggtaatttagaagttaaccaaatatgcgtgttatagttacattttagattctaatttttaggacttcatgagcctctattcctgttcatcattttgtaaacagaactcaagcccacaaaacaaggaatttaaactataaagtgcagttgataaatttgctttgctataaatgaagggatgcaaaaaaaaaaagtaacaattcatttgtaagcaacagtttcttcacacattatgtgactttttttggatttgttttatgttttgggtaaaacagtttagtataatgatgcctaaatgagacaaaacaaaataaattaaaaaacaaaacaaaaacaaaaactaacacatttgactgccgatgtttctcagttgtagcttccaagagctctctattcttcccagcccacttgataccctgcaggttgtggcagacaattcacaggaaaagcttagacatcgagcttgcacgcttcttgactccattttaaaccttttgttcacaccagggtggcattttttcacaccgcatgtggcagttttgactcctatccaacttgtcttataaaatcaaagtctgtgatttttacattcacggggctgcttcctgaaccgctactactgtttgtgtctttcctagtgattggtgcagaagtttatagcaaaatgtgttttagggagagggaggaagaagaatgcaatatgaaaaatgttctgggcctgaaacacaggaaataaattttgaataaaacagaggttgactctgaaaagatcatacccgaaataaaatacactggcctctatttctattattttttgcagcactatgctgggtgttcaggtaaattctttatggaaacaatacaatgacatcattttcaggttgcatgatgttatttttaaaaagctgtcatgtaattgcaaaacaaagtcttatcctcagagccgtacagttattttcttatataatattttataatattcagtgagtgcaaatgaattttacttttagataaaaccatttggtatgctccacttaactatgaacaaaacaaaacctattattttaaaaatctatactataaaccacacatttaaacaatttcaataacaacatcatcattcggaaacttttcttctttcccctatgtttaattaaaaatatcacttcagtcatttatactttctaaatataagttgtacagctatttcaaataaattacatgaagaggatagtcataaaataacaacagaagtgaaaaattttaccaaataccaaagtaggtaaattggctttcttctgtaattattaggaagacataaaactatagataggaaatctctgcagacaatctgacagtaatcgctatataaatctttatatttttcctttgaaattcttattttgttaaaatatcatcttttagttgtgttagcaaaaacataacgaaagaatattctaaaatatttgcaaggcatatgtttaattcagttatttttttgtgtagggaggacagaggaggatttctgctttcatcaacaaatagaaaatcataattatattattttttatatttttgcaagttatagaataagcactcttatttttaaattactactttttaaacattaacaattcattcaccaagaaatcagtcaatagaagtaaatctttatgaagtaataagtatttgtgaacagtggtaaacttcaagataaatattatgacgtatttaatttagcttttagctacaaaaccaacttaatgaaatcatttcagctaattcaaattgtataattggtatatcaaaataaccaaattattgtatttaagaaaaaaataacaaatagttgtagattatagtcttattcctccttccagggaatacctaattaaattaagtgcatttgaattattcattacaatatttgaaatatgaaatggatccaataaattgagaaagacttcaatttagaatttagattttttttttaaactttctggacaagaacatagggaaatagcattttgttgtaagtcttgtaacagtaggcatactagcagacagaacaactgtacactttccctttcacagatagaaaactatttcaactacaatttctataaagtattagggaagaaaatacaaacaattttcaagaataactaaatccaaatggttaatgtaagtaaaaatctatttaaaacaaatgaattgcaataaatgttatagtctgggatttctttttattatgcacagatatttatcaagtacaagtttttgcccctcttttagttaatttaaaaatttgacctcataagaaatagaaaggaaaatattttttgtatttgcatatacaaattttataaagatcaaataaaatccttgtcattaaaagcaaaacaaacaattgaaagcaagtgaaatattcaaataaacatatacgtatttaacccaagtttaatattaagccctcttataaaactaaacggcatctagagatctcacaaagcatttgaaactaaaaatatgaaaaacaaagaaaatcatctaaagaaaggtaagtttatgaaataaaatttacctacttttgcagctgttgtatttgttgaaaaaaagtatgactttatttcatgtgcatgccaaagaatgtagaaatactgtatatttagttcatcatttctcattatctagtatagaaaacccacaacttttattactttaaatttcttattttctaccctccccgcctatgccctcgatgtcttcagagtctcttctggccagcatatcttctgcttgaggtggatcaaaataaagcccccaaacagacacacacaaaataaccaccatccagctgaggagaaatagtttttctgcctttgccctatccttatgtgttaataaaatcagctcatacattctgccacaaaattcagcttggaagtaatcctctgctacttagagctggatgaaaagagtactcattgtgaattatgtttcatctgtcacaataaccttctttattctgtcagggacctcccctttgcctgtggcaattagagaaaataggtatgcgttgaagtatgaaatagtgggttcttaaaatgaaacaaaacaaaacagaaactgatgacacatacagacagtacttgctaagcaatatactgcagattagtagaggaggcattttaaagtcattctgattttacaagaacacagtaaaagaatgctttttagaatgagcaggtgttatagttgctattagttattgtcaacattagttattgatgacaagctgtgaattgtaattgtactaaaaatgaaatgtgaaaatctttttatattgtgtactttctaattaaatcatgccataagatatatatcataaatatatagtatttatttaacatatgaaatcgccatgattttatatgcctttcacagatcataatgaatttatgtgcttttgagtctattttaatgctccagaataacatttttgcaaattttttaatgggcaaaaacaaagaaaaactttcccttgaaacagagcttatcagacaattttgtttaatttaaaatcaatgtgattatttgatttacttactcttacaaatcactgaaattacctggaggcagttcaagttcacctttctggaataaacctgttaaatgatagacaccatctcattatctccttgaaagaacacctcaactttttggcttcataggttacagtcaaagttatactatctctagttacaaatgaattaatctagaagatcttaaaaagcttaaaaggaaaacaaacatagttgacagaaaagaaaatgctccttctaataccaaaagaaagtcactgctgacgaagtaactgaaacggtcatcgtaacagttggataaagacatataaataatttaagctaacacgaaattcataaagtctgaagaaaaaattcttgaggctaaaaggaaaaccttttggcccactgcacaggttgggcacaaaagtgcttgctaagctatctatttcacacatgcaacgacagaaggttcgatattcattcgatcgatgagtgaaaaggcacaatggcaaaatcagacagacttcttttcaaatacagatctccaatgtccccctccagtctgcagatgcacggctggtggtgtggctcagacggagcaagggttacatcaaggctattctctggaccgtgcaaacagtctagaccaatgacctgcagcatcatgtcctttgaagaagaggcaagttcggtcatgatgaagaaaaatcaaggcgtaccccttttaacaatagggagcagctcgaggctgcaaagaggtaagcagggtgagaagaaaacggcatctgcttccatggttacaggccaactatgagaaccttgcttttcaaaggagtctgttctcaggctccctcacagggtatgtcatgcattataagcaaaggcaggttgagctgaaatccgcatagttatttcagagtaaaatgatacggagcacatggctggcagaaaaaacagtcacatgactgttaagaaccagacttgggctatttcagaaaagattttttttttttcttatatcagttaaagaaagacagtaaatttgtataaaacaaacaaccatgataaacatgattttcatttctcaggcttttatgtgagcagaggtcaagggtcaagacacccctccactccaatggcaggaccatacagcttattgttaatatagctttattatggatatcattttaaaatattttcctcttttgggcggaccataacatagaatttgtgttcttgtgaaatttctctctctgacctgattctctttgatgtgctccccaggattttctgtgttttagatctcatgttcatttccgttgttagatctcatgcggagaggtagaaggtttggtgagaaacttccttgttgtgtggttactcctctaagatagcgcgagcttgcctctgcctcgtgaaatctgcttatggataattcaaatctgcagcaaaatcattcgcctctgacaatcgtcctgtttctaattcatgcctttgtagtttattcgatgtgtaatacatcaatgagtctatagattctaatatcaatgtttttttcttttctgcaagataaagttgaatttcataatatgatacactagcagctaatgttatctgaataaaaatttgacaagcatgaaatgtaacatattctgtattattaaggaaagaccatagtatatagtaaccacacaaaatgcacacatatataaaattaacatggataagacattcctctgacaatgtaccacaactcaatattagaagaattaatattgggttatgttctaactatgcacaattaactacagatgttccatgcagtgtatcctttgagcaatttttgtttgcaagtatattgttaaaattagggagtgaaaaaggaaagaatctttcaaaggacaaggcatgaaaacaactttcattaaatttatttttcagaatttatgtattttaatataaatgggtaccatatagttttgtgtgtagatattcatttcaaatactgaccttgtaggaaaatatccttatagcttcgcaaaagcaatgaagtgttggtgatcatggtagaaacaattttacgctttcaattaagaaaccagagaaatatttgctggtatgtttctcatatagatgccttgatttgagttgggttcatgggcaaacatatgcttattgtttggtttctttgaatgtgttgaggtacattagtttctattcttgcatggtgagaataacttaaggtctaaaaaaagtgagctattggaatgtcactattatagtataataatctatacactagtataagcactgaatgtattatcttaaagtagccatgttctatttgctttaaataatttacatactaccaaaacaattcaacatcagagtttctttgatgtaacaacggatcacactttctcccaaaggtcaagtggcaaatatttctccaatgaaaaatctacctgtcagttctccaaaggaaaacaaaacaaaacaaaaacaaatacacgaaggtttatacattgcatgataatttgtgagttgtgattaaacggaattgtgtctattacctgaaatctgttgcaaaatagatagttggattcttgttattttttcagttagcatttagcctactcctgcttttttgtttttcaaaaacatgttcagtgttaggaatatttacatgtgaccataaattagatgaacttgctaagtgtggacatgtttaaacacttagaaacattctaatagagtcaaattggtggttcataaaatgctattatttaaacatttaacaaccaggtaaaaatatttaatattgagtatttagtgggaaatgacagcttcttgcctttaaaaaattctctatatctgagttatcaaatagctgtgtattatgtacatcctgcatatagtttgcaaaacctccactcctaacatgtgttagatttaaatattcctttaaattacattttagattaattattgagttttgccctcctcacttcaaaatttgtttaaaaaaggaaaactaaacttggccttgcctaatggagcatttatccttaaacgtgaaaaaagagtctgaaatgtttcagtgacttagtgtcccgatagtgctctgaatatagtatatgctcaataaatacctctctaataaatgaatacaactatggttgcaccaatgaaacaattttcagaataatccagtctcatgaaaatcaggaaatagtcccttctatttattcatatatcgtttctaacctttttcgtatgaccgttctatatgcatgaatccttcttgtcagtaatttgctattagtaaatgactactttgtgtccagtatgactagaagtgtgtgcctacagccacatttcccaaacaaggtcctgtgaagcattattattctgaaacatgttggaaggtattctgagggaaaaaaatcaaagagtcaaataaatgtgagaaagatgctatgttaaacaatggaaattaggtttcttatgtacaatagattttaggacatttaaaagactaatgtatatagtgcatacctaagaagggtgtatagttgacatcatttcacagaactatttaatcaacttttttcagaaaatacttagtaatgtaatatgacctaatttcacagatgtgctcaagctggcttaagccagattgaataaaccaattttaactatctcttcttatattccattttcagtgacatcattttcttagcttgaaatcagttgtggcaggagtatttgcaccatggaaatcagcaaatgctataaatcagggctttttttctttttccttttttgagactggttgttgagcatttaccagcacagcattgcctcattttgtctctgaatccatttttgtaggtaagctgtgcactaaaaggtcagtaagttcagaggctttctattcatcagactgtctaaaatacaaaacaatttaaagcaaattgtgaacattagacataaaagaaagggatagcattaaaaaatattggacactcaatttttcttttaagatttagcggttatatcaggatttcaaagagtttatgtttctgatttctttaaattacctggataaacatctatgtttattcatttatcccttttctatcaaaacatttacatacactggtatgtaattgtctaatcatatttaagtgagttctcaacatgaaagctctgaaaatctccagacatcctttaaaagtgtctctaactcagacccacttcatacgaactttgagttcgtataatgctgagatgaagcatctttaatcaggatatacactttattgcatatcatgtaatttacggcattttatcagacatgtttacctgcctgacatcttgggtgagatttttaggagaaaaacaaaaatggaaaatctatgaatagagaatttgaaaaacacattttaagtgataaatcaattaattcccaactaatcttttacctactaaatttctgtgaataggttaacaagtaaaatctgtaaatataggtagcgtataagtatagatattggctaaataaaagatgtaaaatcatgaatggattcttccttggccttattgcttgaagccatgagttctatggtgacatgttttgaagggcctctggaatctactttgtgacagtatatgagatgatttatatgagggttctaatttaccttcccaaacccaggaacccaaagcactaggcacttcagtttacagagccctcaaattaattaatccgagtgtctattttgagccaagttttgtgttatttatcagaaactaaaacatgactaatacatggtttctgtcgttgtggagcccacagtcaaatgtgagaagaaagcagctgaaatgtgttatcacaagagaaaattttctgaatataacagaatatatatatatttgatctaaagtgatatatctatcaaatttaaagtgataaatatatgtgtgtgtgtgtgtgtgtgtgtatatatatatatatatatatatatatatatttaactcccagaattcttctggtttaatcccagaatctcatatactttttggattctactctcatcacataataggtattggtacatcacagagagctccatattcacaaaacattaatgaatagtacaaccaagatggcaatgatatgatccttaatatagtcttgagtgaggagtaagtacaggttgcgttacagaatcttgctgtccatcctgtttgtaaacatagggaagaatttcacataacgtcaagattctcaaaggatacttcactattaaagataaatacaagcaattctaaacccagtgaaaattctcacagacattcagcttagataatactgtatgcctgtgtgtttatgtatgaaatacatatttgaatactcattggataagatgttctttgtatttggaaaaaaatcttttggacatactaacattatacttctgaaaactctgaagccaatataaagttgtaaaaggctttacttttcattatatcaaccacgctggaaattcatacacaattttatcactggaaaattttcttctctgtgccataaaacctggaactcttctttcaaacagcacctcccaaatttgaaaacgtattactgtaaaatatttatatatgaaaggtttttaaatgaattattgaatgtcagatatttaataaaaatacttttgctatttgatagataaatttataagcactattatctttcaattttagataaaataattttatatatttttaaagaacatatctcacatatctctgctcttgataacaaatagtgttttttttttaagaatttctatctagaaaatttaattcatttttctgggcctagttcaactattctctcttttgtatgtctcttctcactggactatcttctctttctatctttcccccttatatatactcatctgctcttcacttctgttccgcttatatttttgctaaggtaggaacaaataatggtaataaataggtggcaaagggaaaattttaaaatatatacagaagatctttacattggaatgctgtagtaattgagtctaaaactcagctctgaactttgaaccacttttttaaaaatgctgtgtttgaaccttaaaaaatgtaaaataaaaacaatctccctcccttctgaaaggggaaatgaccttcttactcctgtccattcttttatctgagcaatgaggggtgaatgtgtttataaaaagccatgtttaggctctatattgccctgctttccaaaaattattgtttgtttttactaacataagatcacccaaagcaatttcctttaattagcatgtcataaccttcctatttttgttgagtatcaaatccatttgacttagccatggtgtgtctctgtgtatgtgcagaccccctaatgttaacatgtgttaaagtaagcatcgctcaatactttgtttttacagatggatgtcaactattgtgcttgctacattactttgtggcctcttttgtattctttttttctcaaatgattgactccatcttcatttacttccaccaggctgttcaattttgcttccattaaaaagaggctcaatcctttaaatttctttttttctttgagggccacatccatggacctaaaatatgtttttttaaattcatattcattatcatatattttatataaatcatattatcagttaataatatatattgagtattctttataggatattatttattgctttgttaattatacttatttaatatagaaatagttatattaatactcagtattaagtaagaataattctatgtgatagtgttactactttatatatatatatacacatatatcaatatgtatggtgtgatggttcttctattgctatatactatacatactgctatacatatgtatacatgatgaaatatacagttttctatatatactgtcaaatattgtcaaatatatttagtcaaatacatatagtttgactatatatagttatattcatatataggatatatgaatatataaatatagaatatatttattcatatatatcctatatataagaatatatataactatatgtaagccaaatatatataaaagtaacaaatatattttactatatatttgaatatataaatgtatttgaatatatatgtatttgaatatataaatttatgcaaaataaaaacataaataaaatatatatagtcaaatatgtatatatataagaataacatttctatgtgatggatcttctattgctgtctgtctatctagtcaaatatatatcatcatgatatatatatttgaaggcagataggttctctagttttataccagttaagcagttaactttagtaactctaagtgagagtaactcttcaagtgaaactttgaaagagtaacagctcacaggagtgtaagtgtttctccttgaattttacagtgctcctccctcttctttgggataaaggattggagagggtgattctttctgcctcttttcgtcctcctttaaatgaattattatctttttactccagcattccaggactcagggtgtactttttaacaacacacctaaaagttgttttgttttaccaattcttttttaaaaaccccaaatcatccagaaagcagttgctcctctttcatcctgtaatgaacctgcagagtaacctggggatattgttaatactcaattaagattcaggcatctggggtggagtctgagaatctgcatttccaataagaccccaggaggtgatgatgatgctggcctattggttgaggttagaatgtgagagttagaagactttgcttcaagttttcgctttgtcccaattctgatcttaacctagagacttaacctccctgatcctgttccttatctataaaatgggtggaatcatgtttcttctgcctgcctacccatagaattgttctgtacttcaaattaaattaaggaggaaagcactttataacaaaagaacagaagagaaggtaatgcagcaggatatttcgccttatttcttgaagagtatattttataccagtaacctaatttcctttagagtttgcccagttagcctaaaatgatgacccctgttttaaagttatcttcagtagttctttatcctcttttactctcctctttttgttcatttattcattcatcagacacttattgtgtagctactatgcacaatacattgtgccagctgctgtggttgcaattgactctttccatttacttctacttttttctcattctttcaaatactttgatttattgatttcactctgtgctccatgtctcccatatcttttacttctgccttcagtgggatgttgaaatcactaatttgaaggttgcattcgtctctttgaatcaattgtatttaatttcacaaatatttactgattccccattatatggcagaatctctacaaaaagaatacagaattgaagaacagtacttttttttaggaaaaaaaagtttatatcctatttgggaaataagatttttaataatttttcaatgaactatagtaccaggcaggagatttttggtgtcataagaaacactttaaaggaggaagtcacagctgacttgaagggtttgaaaaagacttcttaaaagatggctaaattgtgacagaaatagatgagaggaagaagaggatagatattacaggtggaacaaattataccttcccctctctttgctttcattcatggtgagtgacttgggaaaatggtctggtgtaggcaaaaaggtcttaaaagtatatgagggaaagctggaagctcttattggagtcacactgtgatagccttggatggaagctatgggagtctgtacttaatttggggggcattaagaagtctttgaaagttaatgttactgttgaccttcctgccatgcattcaaagtcaacctttaattcaattctgtggaatttaaatgtaagtcaactgtcgggctctgggtttgtacagagcagattggcaacctccaggtagtcttttgccagttttcatcaaggcagcatatcataatggacacaatatagtggactgcatgaggacgcccggctgctaatcctggttcactaacttgctagccttttgaccttagagaaggcattcatctgtctgagtcttcagttctttcttataatgatgggaataacaaaatgcctgttttcaaagtttatgatgagagataaatatgaaagaaaaataaattttgaaaatgtaaactttgaaagagcaacagctcactggagtataccggtttctccttgaattttgtagtgcgcctccctattctttgggataaacgattggagagggtgattatttctgcctcttttcctcctcctttaaatgaattattatcttttcactccatcattccaggactcagggcgtactttttgagaacacacataaaagttgttttgttttaccagctctccttcaaaacccccaaatcatccagaaagctgttgctcctctttcatcctgtcatgaatttttgttcatgggaggttatattaactacattgtcattctgaccttagcttaaatatcaccacttaagatatccaccacccctgggcacagccacagtgtccctcatggaacctctcaccatctttttattttccttatggaattgccttcctcatttatttgcttgtatattgcatgtctctttagccaataagattttattagttcattatgtggcagacactgtcacaggaactgggaaaatgtgagtgggtgtgtccttaaagaaacagacacataaatattgatactaataatgatctatttacctatgtgtataaatgccagtaagtaaaaagtgctataaagaaaaataaagcaagctgaaggattagagactgaaggttattatgcctttttttttttttttttttttggtcagaggttcagggcatggttccttgattaggtgctatttactcaaagaccaagaggaagtaagagagtgtgccaagcctgtacctagagagaaagtggtccaagcacagggaattgtgagtgcaaaagctttaaggtggagtcatgtgtggtatgttgaaagacaaggtaggaggccagggtggctagagtgcagtgagccagcagacagcagtagacactgaggccagagggttagaggacagggcctgggcaccatcaaataagctttggagttcctgttagggtcggagatctcactcagtgtgacatggggagcctctccggaggctttgggcagaagagtggtatcatcccactcaagtcacgtcggctgccatgtggtgatgaggctattaggtggctagtgtcaaagaagggagaagcagcgttatatcggaatgggctcctaccaactcagcagaagccatgtgtgcatctcttcctgaaccatgccctcatgtcacttgaaattagccacggcgaaggtaagtccatgtggaaatctgcaaatactatagaggatttcttctccctcccttgtcccttccccttctcgtctttcctgcatttcttcctttcttcttcttcttcttcctcctcctccagttccttcttttctctttttttttacaacattatatatacttatttattgtttataagcaaagttgttgataaacacttaccagcacatctcagaagagacttttagaagtgtattgcaaccatttatgtaaaagatggtggtggcttagactagcatggtaacaaaggaggtgataggaagtggtgagattctgcaaggaatcttcaaaggaagcacggacaggttttactgaatgactaagaaaacggtggagaaaacattcctcgacaaaatagtagagaaaataatgagtgaagcctggcttccaggttttcatcttagtatctaaaagaatagttatcgtggattaagatggaaatggcttcaataaatgagcagtttgtgaaatgagtgttaaaaacctgatttcagacatataaagattgacatcttaaggtgtagccaagtggagatattgagtagaaagttggatatatgagcttcgtactcaggaaaggagtctggattggagatatcaatttgggaagtatctgcaaggagaatagtatgattctgttctccctaatttaaatgggggctgattgcatatcagaacagagaggcaatgccaccatacttccactgcatcttttgcagactgctgagtcaggtgtttttttgatgctttttataattttaatataatttgagcaaccaaatgaaagttgctatggattgattgaacccttactttttctgcaattcattttcatagttatgcttcttgcttcctggaaccaatcagctacagcatcacttctcaaaatgtggtctcagtactgcctacatcagattaaataggtgcattgtaaaatgtagatttctgcattccagtgtcagacctatttaatcttaatattagtccagggacccgaaaatatccattttacaaaacaaatacgcattgtctttattatgcaaataacaatttggcccctcctgatgtaatgtttaaatataaagtttaatatctatcgttttgtaaggattcccatggcaaaaaaaaaaaattgtttatatcatttatatatttaaacctgcctgtacatattctaggttgttcagattaaaatagatttaatttcagtcatatagatttcaatcttagttaaataggaaaaccaaatttaatcatcttttttttttttttttgaggaaaagtgtaattttagggcatactgtagatatactgttcaaaacaggaaacctgagttttcaactgtaggtattggattgctatggtaatttaaatagcaaatatttctgattttctcatgttttgggtgacagaatcgtgttgcatttcccagctctcgtgatttagatggtatagaaaagtaattgtgaccaagtgtgcctggggccagagtatttaatttccagtgttccttcatcttacttgtgtctttctccacatttgaggtggaagctgccctgttatcctgcttagctaagatgctacagtcagcaaagcttccctgctaacctgtaatgaacgtttaatgtgagggagaaatactttgtgattttaaactggttggtactccagcataatctaaagcatcctgactgattgtgactttctctagcaaaaatgaactgctctaacctgagttatctcctatttaacatgctgacagcgggaattgatctaaggtaattcattgccccaacaaattagggatttttttgtcaatattttgacctttgacaaatgagagataggtaggaggtaaaggtctcttcttttacaaatttgctactaattaggttgtttcaaaaacaaaaacaaaccaagaaacaaatgttaccgatcgatttctgcaaaggtagagacttttattaacaatcaggtatgaaaccaaatagcttgttctgaataatctggagggtgtctctgttccttgtctttttaggtatgccatccagcactttgtagaaaaggttcactgcagagcaaatgcaactgtattctagtagcaggagcaatgagccttctagtagtaccaggtgaaggaccctccttatatgtccaggagtgggtagcaattcaaatagattttagatcaaaggtaccacttcaaagatgttagactcacaaccttttcctggggttattttactttgttcccacagtggggagattacccagtgtttcttgccaatcacatatcttcatcatcatttttctcatcaatgaaaaattatttgtaactgtcttgtaaattaccaagctcccatgggtagtttcacagtgcaatatttggagacttgaagcatttgccacaggtgcccctagagtataaactactgattaggaaatggtagatcttaaccaatgtaaagagtggatctctaattagatttctttaaatcttagctaacttcttctagtgtgtacattaaagaaaaaccaaggtactgtgaaatctctctactggagcattttaaagtaaagtataggcactaacagaattaattacagatttttgtttattttcccctatgttctactaggactacaaaaaccataaaactcaccagaatcttacattattttattcaacaaatgtagaagtattgcttgatcaagtaatgtggtgcttgatttttaacaatttactgtagactttgttatcaatatttaactagtttacttcaatattaaacagatcaataaccatttgttatttaaacaaatgtttaaccacaaacatacctatatgtatatggatgtgtgtgtttgtgtatgtatgtataattgagctgcttatatatcatgtagttttttaaacaaaaaaatagataatagcatcttaaaattaaatcttgagacattgggttataagtttcaattttgcttttctttctgcgtattcatggtctgtagaggagactagacttccctaatgttttagtttccaaatattttgccaagtatgaatgaactaggtcaacgaaggaaaacattctttctgaagcctacattaatattctactgtttgaaaaactgggctaacccttcaatcattttgttaatatttgtagcttctcacagagttgtaaaacctcataagtaaacataggtttttcaaatctttacctcattttaaattcttttagttactgttgtgaataaagaatttctggatggctaatatcagctaataagattagtaaggaatgaattgtaaatagagcatataaaattacttattttcaaatacttcttaaaaacttgaaatagtgtctctagtattataattttatacatttgactttttatgatatatttaatggtaacatttaaaataaaactgttttttaaaagtagcattttactagcccaatgactgaaaaaaagtttgtaaatttatagattttaaacaaattgaatggtgctagtttttctattcacttttgtctctaaaatatttttggtattttgtaaacagcaataaaaatagcaagagtaaaatttgacttcatggaaacttaactgtgactggacctcttttaataatttttattaattttgactcctgtgaattttgatgtttggaggttatatatttccaaacttaaaaaacagacctacaataaattagattgattattcctagtgaagtactttactaatattattgatattattgtgtagtagttattagggagtctaagaggaagactatttttattatagggaggatggtttcaactgacaggttttaaactaaaatgtttaagcattttagacattctattttaataagtatgttttagttttaatttttttaagaataaatgtgaaatgaatgatttggatataggttagtttatggaaatttttgatgatgactatgtattgattacttttcatttcaggttattgattattaaaatggcattataaagagatagctccaaaataacagtgtcttaattacttgaaagacatgttgttttaatattgcactgtaacataccataccatatttggtgattttttttctctattccagttttgtatgctactgtagggcatagaatgtgagtagcacccctagaactcaaagtatatttttatgtgaagctgaaatgtttttaacttgactcagccagttaataatttttggatttggcaagcttcagtacggtcctatttttgagaaaagccaacaaaagtatttatcttctaattcaatgtccttttttcccttaaagagatttttgtgtgcaaatgcttataaatgtattgttattacagtaacactaacatattctatttctttctacggtgctaaaaataattaacatttatggtacatttaaacttttgtcagtcagaagatctagttattaaaccaaatgaaataggtataacaataccttctgtattggagttagattatctctgaaagtaatacacacatcagatgttatatggtaccaccgctacctcaaaaccatgcatcctaatatgtttatttataataaaaattttaaatcagtcatacattttcttctgaaatgcatacatagcatatgcaatggactggtggaaatactgtaccatttctcattacttattagaatgacttaaaatattggttttggctaaacaactaatcagtattttagtggaacagatttacaacctttcctgacagtaaaatacactttttgtatataacatttcttacccaaagacagttggcacagtagtaaacttaataatcacctccagaaataaaacatggaaaaacaatgttaaattaaaaacaattggcaactttagatatacgtatatgcttgtgtgtatgttaatgtgtgtatattatacacacagagtttatacaggcatataataatataccattatgtattatatatatatataacatagacatataatatatatttaaataaattatataagtatatataagtaaattatataaatacatataaatatgtaaacataattatatagatatataattataaaggcaatagattctaaaactcaaaacagacacatataaagagaaagttactaatcatttcctcctgtcatcctgaggcagccaatgtcagagtgtggtgtgtgtttctttacctcactcatgagcttctccaagctcagaaagcacagatgcacgtttgtacatctcttttgttagaaagagagatgtggttttgtttctgtggtttgtttttatacagaaactatcaaacacattgctcttcattttgttttttatagataccccttcaaattaatatacagaatattcatattaaggcatgctatttttaatttaaggaaataaaaatctggatattcattgtctttcttttatcatagccatagtaaaaagtaccaatattgtcatggactgcaaatctcagggatattttaactccagatctggtaatcgcatgaaaatgactctgatgtctatgggaaagcaggaaaccaagatttacaaagtgaattgcaatttggtagacaatgttcttttactgatctacttgttatctagtgctatctatctccaaaaatacctgatcctcatggtagaatacatgcttcactatgatataatggttgtagttttcagacaccgtatttggtgaaaaaaatcacattataaaaccatacgtcagtagaaaggaatgagttagggaatagatttgctaagcttctaccaatggtataaaggcggatgcaggattttctttagattaagactaggtataatgaagagagcaaaaataagttaagccatggattaatccaagtgaatacagttcaaggaaaataaacatgatacaatcatatgtaagagtaaataatattcctcaatgaaaacattataacaattttgtttagaatgccataggccatcagaaagctgtatatatatatatgtattatatattgtatacactcatctattacatatttaacatgtattacatacatattaatgtttattatatattcatatttcacgtagtatactgatatagtatacctaccatactgttaggtgcatctgactttttccatcttaaattttgcatgcacaaagtatatttcttgtacaaaatttaaatcctaacaataatatagcaaaggtagatcatgcttttgagaagctttttaaattaacaagtgtttaaaagtctttgtatatatgtctgttacatgtgtgtgctatgtgtgtgtgtgtgtgtgtgtgtgtgtgtgtgtgtgtgtgtttagcattgagcctaagttccaagcaaccagtgtgggtcaggcagatttagttcagctggaacgtaaggagaaaattgacaagaatgattcaattcaatctatcaacattgattaaatgcttactatacactaggtactcttctaaacgttcaggtcatagtagtgatcacaaaaagtcccaagcaaacatggttcttatattctacaggtggtgctgggggcacatagagaggaggaagacattaagccaaaaaccaaacaaataaaaagcatcatactgtttttgacagtgtcaaatagtgtgaagaaaaataaagttggttgggtgtctatggggagtgtttcttctatttttggttgcagatgattttttgcagttggtagcatctgagaagagacctgcaagaagtgaagaagtatgctaccaggcatagcccgggaaagggcagcccgaggcagggaaaagagccagtgaggttttcaaggagagcagagtgtggcatatttgagttataccaaagacaataaaatggtgaaataaggccatgaaaggccttgttggccatatcaacaatattggattgtttttcctaagtcagttgggaagcccttggaggcgtttgatcagtgacgtctcagttcatatcatagataagtgaatatgcatattttaagagttcactctgcggccgggcgtgatggctcacgcctgttatcccagtactttgcgaggccaggtgggcagatcacgaggtcaagagattgagaccatcctggccaacatggcaaaaccccatctctactaaaaatacaaaaattagccaggcgtggtgacccacgcctgttatctcagttactcgggagactgaggcaggagaatcgcttaaacctgggaggcggactttgcagtgagccgagatcacaccactgcactcccgcctggtgacagagtgagactgtgtcacaaaaaaaaaaaaaaagagagagagttctctctgctacataaaaactagcctgagaggaaactgggaaattggttcaacgcttatggcagtactttggaagagtgaacttgtagacactaggtgcttcaaaacagaatgatattaataacataatatttgatttataatttatctacttctcacaacagaatagaataatatgtgtagagctttaaagcaatactagcatacagtaagttccatggaaattctaactattaactttatcctctgtatcatcataatcaccatcatcattatccaaatccttaatagatgctcttgggaaaaaggtcattttaaatgatattacaaatatgaccctcttttcctcactaaagtcaagcataagttaaaggatttgaggatgtgccctattacagagttgtttaagaattttacgtgtaacatccaatgtttttttcatccttaagttgttgcatgagttataattaaacctaatttaaaaaaacagctaaactaaattggcattgtttctatttacattttaaaaattaaatcctaatcaaacttttcctcttcatttatatgaaaattttgtctccaaatgtgtacatttattttcagctgacttttcccagcctgttcctcttagatagaaatgtcttctctgtactattgtttttatatgatttttttcaatgctcaaccctacttgatatacatacatatacacaaccatgtacaacattcactgtactctttgaaattcatggcttagcacatgaaaagtagcatattaaactttaaaataatacaaatatatttggttatccttgaaaaatataaacattcgcaaaaaatatcaccagccgcacatacatatattcatataaaataatgtatattaataaaaaacttatataggcaatgatacaatcattaagtgttagcttggaagtagatggtatcagaaaattagaaaatagttcttgtgtaagttattcttctactaattggttcttagtttcctgaggactgctttcttaaaaacagatttacatggtatgcagatcagttttgtgtagtgtttttgttttgtggttactattattttgtttgttttatgtgtgtattttttaaagtctgacagagtgataaatggtgctagttttaacttgagcttcaaatactgattgatattttttaaacatacacctttgatacaataacaaaacaaataaaaacagagcgttaagtcaaatggagaaactagcacagataaaatgttctagttttctgatctatgcctggcaaataaatgtatgtacttagggaaatttggtgtgttttcctatgtgatacataaactggataattttaatatattccccattttggacattatattagagtgagaaaaacagaaaatatatttaaaatcataaaaagtattagtaaagttctgaaattaaaataactccatgagtatttttttaagaaaatattttcaatttagtgataaatgagtttgtatatatacggccaaatccaaaatagtctaaagctaagattgaggcctgtctcagctaaattacataaaatcaaatgataaaagttgacacttaactcatcttggactttggatgtaaaacatatgttgctgatgttagtttgacatgtgtcaaacaccttcaaaatgtatgtatgaatatttatattcttcatacatacctgtttatgggataatattgaaattaaataacattcttagaaaattaatgtgacaatatccaaacagaattgagatctcagacacaaaacatctgagtttaggcctatttgccattgacctattactaaagtgcttctgaaaaatgtcctcacagaaggttgtttggcctttcatcctgctccaaagtgggtgagcatagctcagctgatgtctacaaactgtcagattctatgagcagagatcgtgtttttccttctaacagtataagttgccgttgtttaatcttttgatgtggctctggaagagaatatggtcattggtactcactctagggaagaaaaagagcagttgggggtggagggaggaggatgcagattgaaagacgtaaaatagtggcaaaagacagtgttccttctccagaggtgaagacctgagtcccagctgggagacatgtatcagtttctgtgcctgggaacttcacatctttggcacctatcttgtgctcagtgtaagtccagcattaagatatatgtatttttcctactgcatagcatctaaatggaaaccagtcatatcattaactggttaattaacagataacaaagaagccaaattaaaaaacaaaaataaaaattctgcctttattagactaattgagaggccccaggttttcaccatgcatggttgctttagaacctaactccccaggaagatgtggctccattctgctaggaagcagtctagagcagcactatgcaaagtggggtccatgggccaggcccttctgagaacagtttgatacccattagaaaacatggaagtacaaaaatagagagtaagcctttagaaaatttcatagaaaatcaacccaacatttgtctgttgattcaagtaataaaatatgaatgttttaatgtcagtttttacatttagtttctctagttatccacttttactgtaaattggaaaacattacttcatgatttaggaaaaaaatagtctggcttagaccacagttagtttgagaagcactggggtagcacttttagagtttcaacacagatcaatataagacaagtgtgatcaatggcaaaagtattttcaatcccttgaaacatcaaggcaacaatgaggttgcataattatatccctaaagaaatttacatctttattaataagctttgtcctctctcttttcttaagtattcatgtaaaaacattctgaatgcaaaaaatcatatttaaacactaaatagaatgtcagtagaattgcatttgtatgtgttaaaatcctattgtcattttactataaacttcttctctccttgctgttattgcctaacttctacagggcatttgtatgtggccttcttaaaacatttactggaaagaaacttaataaaaataaatttatcaatccaagatgtgatttctcatgagaatcttgaatatctgcatttagaaattatatatatggtcatttatagaaaaaaggaaagatctccttaaaaactggaataagaaaatgatttatatagtcatgctaacaaaatatcttattttagcaaccacctgtctatcactcttaccagtgaaaattattcataaaatagctgctccttataactaggggtaagagatatgcaaacaagactgcttttaatcttgaaaagcatgcaaaacaaaatttaaacatagacatcaaaagagaaaaactgttctccaatttgtcaccaagtcattgctccctatattaagtccagcaattcacgaaaccctcactcattgtttgcagtgccctgtagcaagctggaagtgtctttatatgtattattaaattgccgttactgccatctagtgggaagaaatactccctgtcactatgtcagggattgtacataaagccctaaagttctaagtgtaaagggaaagccacagtttgtgtgaatcgcagagagcaaaatggcaaactgaagacacaatctcatgacaatagagacataatagacatctattcaccgaataagttaaagaggtatgtaggacgaaaagaaagggtgtggggaatgcatgcattcacgagaattcattttgtgtacacccaaaattacatctaaagtattatttcttattgaacacaggttacctgaaccaggacattttattacatgtagacttattttgtctttaccttttgaatgtagatggattgttttgcatgtgcttattaagtcttaaaaatgaagacagcttagatctgttcttaaaaggtaaggttcatacgaaacactgtaacgagggaatcttgttacaatgcagattcagactccccgggggtctgcatttctagcagctcttaggtgataccatgctcctgtttatagtcagatcatactttaggcagttacaggcttcgagtgggttaccaaagggaaggagtccagaaatgaagcaaactcccccacagagtatatttcaccgcttgttatcttgttgttataatgtaatagactagttcattcaatggcctatacagtcaaattgccaaattcatttcttgagtttgttacttaactatgtaggtaaacttggacaagatatttcacatctctatgacttagtttcatcatctgtaaaataaaataaatcataactaaatatatctaaatagacatacataaataactatctcatggttcttatgggaaataaatgagctaaaatctcaggatgagccatatgaaattgtcctctttatagatgaaaaataaacatccacaattttatatagttaaaactaagtatgtaaattatttagtataatatgtagcacctagtgaacaataaatgttagtatcagcaacaattgtcactgggtaaattcatagacacatgaatgtactaacaccctaaaaagtttctttcaatgaagaaaattttgacatcaaatacacattatgcagtagcacatataaaccacgaggacataaaaaaaaaacaaagactctggataaaattaataatatgataaacctgttctggggaaaataggccatgaaagtatctattgttttctaaattattagagcaagcatacttcatgtttttgaattctttgtcgttcttacgctgtaaacatttttacatgatttcaagctatgttacattccttagttgtatggtgaatcataaaatgtgtgataaattatttatatttataaagttttgcctcaaataatagcatttagcactgtgctttgatgaagggacattcatttgtatgaaaagcagttctgcttcttttgagtacatttagtcactttgcttaaatgaatagatatttcctaattttgaccctcaggttttaaactttgcttgaagtgtactgatttttgctcttgtgaagtattgttggtgaactacagagaagcatgtaacatactataaaactataaactttaaaattatgagttagaatctggttggtattaacttaaattgatgttaatggttacatatacaggctatcaactgagatatattgtaattctttctaaggagtccttctttttctaaaatttgaaatcttttcaaccttttgatgtatataaaatatttgttataaacctgttttataatgaaagtaatttttattaccacgtagtttagagactaaacttgtaagtttcaaggttagtggaagaaagaatttaagccactataatctattccacatgggcaacaaagtacatttaaggaataaaactattagactatatttattgaatgatgaaactcaagctggtgttatataaagtgatgaaggaattactgaattctctttttttcgttttttgagatggagtctcgctctgtggcccaggctggagtgcagtggcactatcttggctcactgcaacccctgcctcctgggttcaagtgattctcctgcctcagcctcccgtgtagctggtattacaggtgcccaccaccatgcctggctaatttttgttaaattctcttttccaaagatgcgatactattattctgttgcagcaacaaaaactgggtatacacacaaaataattgaaaacatgatatttatacatctaggctcatgtcagcattattcacaacaggcaaaagatggaagcaatccagatgttcattggaaaaataaaatatggtgtgtacagacactggaatgttattcagctgtaaaaaggcatgatattctgatacatgctatggcatcaaagatcattgagaacattatgctaagtaatataagtcagacacgggaaaacacatgttttgtgattttaattatataaggaatctaggataattaaatacataaaagcacaaagtagatcagtggctaccaggaactgagaagaggaggaaatgaggagttaatatttaataggtacagagtctcagtgtgagatgatgaaaaagttctatagttggactggtgatggctgcgctttacacttaaaatgactaaaatgatacattctatactgttttgtatattcatttcagtacaataagaataatttataaaagacgctaatgagctcctagtcatcatatgacacaaaggtgtcttttaggaaccatgaaattaatttaaaaaaaaagtctactctcatacctacacagctattttccgtctgttatggtaagaaacagaagttaaggttgttaacaaaaataatttggaaagcaagacaggagatcaactgtttgcatcactttaggcgaagttaattgacactcaatgtctgtctttgtcttttcaggctgctaaaacaaaacatcgtaaattgtctggtgagggcctacattctggttcatagatggcatcttttcactgtgttctcacattggtggaaaggaagaactctggtttcttcacttccttataagggcaccaatcttattcacgagggcttcaccctcgaaataatcacgtcctcaaaacccccaccttctaatattctaataccatcacgtgagggcttaggtttcaacataagaattcggtggtggtggggttggggggagagggaaacaaacattcagaccatatcaatgctttatttttctctttttaaatctggccattgtgagaattacaggagaattaaaggcatctgtcatcatcccagacacatagtaagttcttaatatgggtggttattgttattttttctgatgttgttattgcttgaactttcaagatgtagggacaaaagttttatataaataacaagaagttcaactaaacactgtattgtacatcctgtaaatatgtagaatatggaggcacaaaaatgagctttaggaccaaaatacaaatatgttaaaatagtttagactcaagtgttaatgctagatggtcagtcctgaactttgccaccctactattatcagagaagtgaaaaataataatttttttttcttttttcttttttttttttttttttgagacggacttttgcttttgttgcccaggctggagggcaacggtgcaatctcgactcaccacaacctccatctccgaggttcaagcgattctcctgccttagcctcccaagtagctgggattacaggcacctaccaccgggcccggctaattttgtattttgagtatagacggggtttctccatgttggtcaggctggtctcaaactcccgacctcaagtgacccacccgcctcagtctcccaaagtgctgggactgcagacgtgagccaccatgcctggcctctaagaataaataataatcttaccaactattctatataagcatttttggcccactgaacactgtgatatgtaacttcattgcaccttcacatcaaccccaccaaaatatacgtaacaataggctaactttaaaattcccaactaaaacaaaaattgtgaccagtaaattacaaagttaataagagacacagtcaaggttgaacaccaggtcttctgactctaagtcaaactctctctttattccctgttgtgtatcataggttgctgtagaccaagtattgaaaatcttgtgttttcttcattttgcattcttagtttatgggattattcagaaaaaattaggagagaatacagtaattcaaaatctacagattttttaagacacagatttttggacatcagtgttcaaatcaatagaaagtcatgcttcccttcagcagcctttattttgacaattttaaggggcaggtacactaaatttctgctgattagatggaatgaatcctatccttaaatcataaagagtgttaatgaatctggtagcaaaagttgattgcagacttcttacaatgacaccatgggatgacaactgtgttaacacaattttgaatatctcattaaacattttttctctgcatgtatatttttcctttttttttttttttagacgagtcttgctctgtcgcccaggctgagtgcagtggcacaatctcagctcactgcaagctccgcctcccgcattcacgccattctccagcctcagcctctcgagtagctgggactataggcgcccgtcaccacacccggctaattttttgtattttttagtagaaatggggtttcaccgtgttagccaggatggtctcgatttcctgacctcgtgatccacccccctcggcctcccaaagtgctgggattacaggcgtgagtcaccgcgcccggccttcttcatacaaatttgttcatgtaatatattaattgcctgcctaccttcctattacaggtttcttaaactttggtagattctcttttgtttctgttcaccaaggtccttcttcatacgaatttgttcatgtaatatattaattgcctgcctaccttcctattacaggtttcttaaactttggtagattctcttttgtttctgttcaccaaggttttgccagaccaagctacaggcagatttttaccattaacagctccttctaaagttattcacgtttggtcagtactctgggctgaaattccaaccatcagtactctttcactttgaaaaataagcttgtttgactttatttggaaacatataactggattgctgtgctggatgctagtgagcaatggtttaaggaccccgtttattgtaggaaagtttattacattttgttttcatactgctttacagggttggaattttttgcagcattggtatatagacaacatgtcatttgttttagttgctacatgacaccttaaagtttattttttctccaaaggaaatggcaactgtattctttaaaaacacctatgtaaaaatgaaataactaaacttgtttttagagtattctatattctagatggataatgccggaaaaaaaaagatgcatgtgtacagcaaaacttgttttatgaaacaactccatgggccaggaaaaattagttgcctaagaaagatgtatagttaactgaaaattaaacacatattgtctttgaaatttataagacatttaaagcatccatttaacttatcggtggtctccatatctgtatagttgatgccagaaagagagaataaaagattacctagagaaatggactttaggtaagattttaagatatgaaacatatgaacaaaatttagttttccagatgatttgtataaaatactgccagataatttgctaattatatggcactggggacaataacaaggattaatgaaaatgttctaactcaacagatttttaaataatatttttcttatacaaataataaagatttattgtaaaaaatagaaaatatagataagaaagagggaaattattcataatttctgctttttaatataaactatgcacatttcagtatatcaacatccatacatttttctatgcatatatacactattgcatacttgaattagtccatattgtacacagtcttttaaaattcacacctttaacataaatattgaaaatacctttttcatgtcataatagtttttgagaaattgagtatcattttaaaataaaagcaatgtccttattgtggaaaagcctagctcctccctgttgattttcacaaaaaatctatgtttggaaatgatagaaaacaacattgtatcatagtgttgtttttctagcaataccacataagctcctggtgtacaatctaggcacttgtgggtgtaacctttgagcatggcttcatgtgtttaagccttagggcctcgagcacgtcctagaacaagtatggagaaatgacattgggtatgctaaggggctgagaccatggtgaggtgtagaatatagaagggctcaggagtaggtctggctcagaagtcagtgtatggggtctaggaagcagctcaatgtaggaaggatgtccttgaacaaaaaggtcaaaaattggataaacacgaattctctgaatgagcacgcatccataaactttaggataacaaaaggccaggctgcaagagactgtgaaatggatatggatcacaataatcaattaaaaaatctttgacatacattaattccactaatatttattaagcataggatagttttatacaccattcccagcttaagacagcttataacatacacaatatggtgagatgattgttaagtaataaaaggcaatatgtaattcatatggtccaagaataagtgctatagggatttgtttattggaaggtttgcttctgacttttgcaaagtagaaatttataatgataatagcggccgatattggcaagtattttataggccttatttttatgttcacaacaacatgtgcataaattattattttcaggaacacagtgcctatggtggttacagtcttggagccagactgtctgagtttgaatctcagccacttactttgtggcttttggcaatttatttaactctctatttttcagttttctcatctatagaaaagaaataatggtagtatctatttgatttagtgattgtaaatactaaatgtgtttatatataatacttataaatagctctacaaatgttagttattgttattaattttattttcgtggtatagaaatgaaggtttggataattaaggtgatatacctaagttatgcaggtagtaaatgttggagccaagggtgaatacagctctctcttacctgaacctgagttcttaatgtagccactttgatgtctcaaactttaagcatgacaagagtgagtcaaagatagtttggattttgattatggatgactggaatcattcgtgaaatagggaagtgactaggagaggttgtttttattgctattgttggataaaggaaaggtcagatttaagatgtcttgaattggaactggtgaggaggcattcagggtgaaatatgtagctgtgagatagaaatcctggaccagaactctgtggagagttggagtggaagctgagattagggtagtatctatgttaagttaataataagattggcagggagataatattttaagaagcaacatatataaaaagaaggactacgtcgagaagtcatagcattattaaccatggggaagagaagctattaaagaactcagaagcagaattgatagggtccaaccagagtcagtgatagcctgtcagcatgcaagatgaagtccaagaactccactaacaacagggtggaactctcaactatgtgagtagagaggaaagatttttctatttttttgatcatgaaattgcttatgaggtacaggccccaggtgttatgaagaatatgacttggttcgtttggggcactgaaggtactgggggaggcgctacttttagagcgctcaaatatgccacgatttcatttcattttgctttctccaggcctgtgacatactaaggcagtttttacttaggcatcgatatcattttcaatttggatcatttcaaaagaaagagaaggacttctatgtgtgtgtgttatatgttttttggcttttcttagtcaagtatttccgaggatattctaccattccttctttttaatttcctgtttttgtttgtttatcaaatgcaccagacaatttatctttcccagaagttttaatttttgttcctatctacataggaaagagctgggaaacagagttttttttttcatatttagattgacattaaaggtatggcaggttctgtttggggagcaattttatgataaataaaactaaattgtgctcctagaagttcatagtgctgatcaaatgacacttatatgttggtctttctttaaaaatttgttacagaaaataataaaaattctaataaaattaattctacttctaattaaagtctagaaataaatccactatgattattttgtcagctttagctgaggaataacaaaatgaaataggataattagctggagcatggattttctgaaatagaggacagtaaactacagttttggagagaaatatctaaatctgaagcacaaaaagaagcaacaaagttgttggaagttctgttctaagcaactatgaatttttttgtagttgctctgctgatttctagggtatttctctatagctaatacttggaaagatacttcctcattgatatgtgtttcctaaaggcatcattggaagttgcttcctatttgtctgatgggttcaggttggtatgttgaatccagtgatgctggaattcaggggcctaaagttcaaggcagactttaggtccccaagattagaaatggattatctgtttgtgtagtctggaatttcatatttcaagttgtatttgaaaattcattcctctgttgcattatatgacttttggctcttggatcattcaaaactctgtcatcgtcttggtcctttgtgtcaatttgtttggttataggttttcacaaaacatggagtagctatgctgcacaattgagatttttcatttattctacatctttcctcagccagcacatgattatgtgattggttcaatagtaggtcctcaccaagactcttcacattttatgttgcctccactagtgtcatatcagtgtggctttagtatcagccaaattcagatccaggattttgttgctgaaaacttaaatttagaatcacatggtgtatatttaaaggaactcttagattctccttttaaggaaagatgtctgaaaattttaaacataggtgtctgtcattgttatggtttggaatttatactatggctgaaaatatcattaaatattggatgggtatgatagcagtattgtcacatctttagctcttttttggttatatatatatttatataggttatatatatatatttatataggttatatatatgtgtgtgtatttttggggacatcttgagttctgggacagcctgctttggtgaaaagagccccaattttggtgtcagactgagtgtgagtgtaggctacattcagttctatccctgctattttccaacggtagacactttagttaaacttattttctctgagcttcagtttctcaactaaaaatgggggtgctacattgtcaggctgctaaaagtttccaatgaggaaatgctaggaaaaccatcatagtatttagtagagtggaatcgtaataaataccagctgcctctcttctctctgccttattccaaattatgtacaccaggatgatttttaatgcaaatgaataccaaattttagctatcatccaattcttccacgatcattcaatccctgtttagttcatagaatcataacagcttggacttgaaagtgacttaaatagcatctagtgtaatctttcacctaaaaggcatggagtcttccagattatggttgaatatttcccatactgagaactctacttcacaaagcaacccactataatttttaaacttgatcttcaataatagcttaaaatcaattcctgtaattatcaaaaccttttgcatatctaaaaccatctatattaccatgctttaaatattcacatgtgaagacttcccactatcttctgttgtgtctcatgtgataaatttttcagatccttcaccactctactaattttcacttttaaagtagtgtgttttaaaataagttggacatttttccctgtaaaatacgattgtttcttgctttcctaattctaataaaggcattcaccttctcctggccacacaagaaagtacagttagaatgtacccatgccaatgtttcttctatacatcttttgaaataaaagtccctaacttggatataatattatactttatatcaataaggtgaacagaaaagaacttggaaagcacccccattcatgctttcacaagtggatattatgtactagcattttagaaggcacattaaaatagtcaagaatttatttcagcattcagcagttcgtgaatccagcagctccagaccacaaactgctcagggctctgacaaaggggttggggaagacttttacagggtgaatgtagaagcaaggcaaataaaatatttgatttgttaaagtacagcagtagccttatttggatcattccagtgggaatccctagtcagaggtatgattgacttaaaatatgaccatttacactgagtggggttttgacttgcttacataggaatcaagggcgctggagccacctcaccccgctggcctcccagttaattttttaacaagagaaaacaaaatgaaaagatattacttttgctaaagaacaaaatgtctatttgggaaaccaagaaaaataacacagtattatcttctctaatatagtgcttctcaaactacttgtggtgaaggaaagtttaaaaagaaattttaatatctgtacagactaatacttttgggaaatacaaaaaaaaacgaattactagaaaaagttatgtttaagatacaaatctctatttgttgttttaatccacaaattattacttttttattattttaagtttagaatcttgaaaaagcttctaaattcttaatttgtatacttactttgtcccagataggtaatgaatagtttgctgagaggcaccactctcagtccacactcagggtaacactgtattagtgcacataaaaataaggtacaactgaatcaaaaaaaaggatcttgtagatgctagagatacaacagtgaacagaccaaaggtcccagagtagagaatgacagatactaaacaaagtaaaatacatagctatagaatttataaccatgcaatggttataaattccatagaagaaaaaataaagcaggcaaaaaggataggaataacatatcgagggttgcaagaaaaatttaaggctatttcttttgattcatggtataagtttttttttttttctacaagcgaacgtctaatcacttatctgtgatggtgattacatgaggttagctcttgtaatcaactattttgtaaatgataaaattaggttttctgaggagaaaatagccttttattcacaagggtaatttttatttttaatatgttaattttaatattttaaaatagattaatatgtttctgattttggctactatttgttttaagatattttacctatggtcataaatgaaattgggctataaattttttattgtgttcttcttattggttttactataaaagctgtattacccttgtaaagaaaattggatggcattccatctttttaaaaaaatctgtgaggcggtttatgaaaaatagagtttgtatgtattctttgaagagaatgatgaaatctacctataaagttgggtaaattgatgagtgttatcattcagttcgctatttctctctttaattggtatcaaatctataatactttctatctactgaggcttctattttaatgtctgtattattagtttccaatatgtctaattttaaaaatcagcctatttttattcatatctgctattataagctcttttaaaaatggatattattaagcatacttatttttagtctttgttaggttgttacatcaaataaattcaaagtaaattaaagtgacaattttggggctgttgcttgtcttttctatctatactaggtcacttgtttaggtacttaggtttacaagcttattctgagtgaaaaggcaagttagaagactttcctcccctccttactcactgtcggcatttttgcagttgcctagcccagaccctccccacatttgagttgaagccacttcatcccaattgcagaagctgttgggttgcctggttcaatttctgactaaaatttatctgtatttaagcccctgtccttttataaagctaactccccaaatagcttcagctgtgagtattttgttttgcttatttctcttgttcaacctctcactcaacaagggagctctacctcaacctctggtttcaagcaaacagcatgaatgtctctggtcccccaactcatgtggaagatactttgtttcctccttttaccacaggaggctgaagttttggccacctgtgttcactgtgggcttagccctgcagctccacttgccgatttgcatttctctgctgattttcagtcattgagttttcattctgttcttaagcctggatttgtcttttggatttttttattcttatactttatttacattgccatgtgtttgaagtggaaataatattttaaattatgaatgctgtaccatcttgactggaattctccttttgtacaaatgaaatctataaatgttttcttaaaaaggactgtttaattgggatctcctaaagtatagcttctttaagtaaaaaaattgtatatttaaccggatggtaagtgggactttgcctggtgaaccagaatttttagtaagcctccaaatctgaaacaatgttatgggtgcccacacattctaaagacattactagatcctcagattggacaccagagaaagaaacctggctgtttcatcttgtttgttttagagttaaaaatatataatttattttcaaagtaattataagaaaaacaatgatcacttctcaactattacaaaaaattatgacagggtttcagaaaaggtgttttttttttttaattgagatagtgtgtgacattttagagttagattttaaatggatacgaacagaatgtaggaatcaacaggaaaatgtaagcagctgcaccaaacataatctctatttcttttgaagtcattgcccacaagaactcacaaaaactaccccatgagaagtggcaccaacacgggttacaactgcactaattaaataagattctctctatgccttaagttctccatctctctgctgtaaccatgacccagcataatgagtagggagaaggaactcaagctgtgaattgtgggaagatgtgactatgcacacctttccctctttctctgttactgcagttcctaagcccgtcaagcccagcagaagagataaaggtattagactggtctgtaaatttcaatgcctaaaaatatccaccaagctgtagatcttcccaagatatttttcaggaacgaagcatgtaaacttacatgagtgaaagacagtggtaaaaaaaaaaaaaaacagtctattttgggctttggctcctacctaaatctagcttgttcaataaacctgttcattaagttttatgttaaaccatattcgtgcatttttccttgccattatacttaataatgcaactttaaaaatcttaaaataaatgaatacttgatttgaaatgttcatgtgtgtacagactttttgattgaagcaaaaaatatttaatgaaatcaaaccttccagactttaaattgcaacccaattcacatgaatacaaatgagcttaaaaataatattgcatatgtataaaaaatcaaataagggaaatataaatcaacagctatgcttgtatcggtttaattttaaggcatgatacaagaattactctgctgcggctcattaacacactactaaaaagcaaatcatatcttttctccattttatgtaacattttattttgcctgattatgtgttctcataaaataggccttcatgacttatataaatgtggaaagaagttatttctgagaaatgttattggcaataaggaattggcttaggtaaactattttagaattggtaagagcctatatggagatcaaatgtattaccatgtaaattcatataccatatacatttcatttcatagctttgctgttattgttgtttcttatgtatatagcccaatacatattttactcacattctccagttgtctgatatcttcgtcagatttttttctcgggtctgtctttaagatttagataaattgaatgttattagcggtactcgttcaattagaatgtttttatgaaacccataaaacattacactgctagagtaaatgattcagcatatgattcaaaccaaactaaatttcccttcaacccaaaataatctctaagtcatagtggtctatacagaatttagtcatattttgatatttataaatattaatcataaatataatatttagagttagtactgaaatcatatttagtaatgataagaatctacttgcttattttgagattaatcactgtagctcctattgtcaaatatctaccgacataaataaaaataaacatgagtttgaacatgttaaatgcacaaagatcatctgaaagtaccaggttgagtaagaaatgattaaagacatgaatgaatatttatattttatagaactttaatttcataataagaagaaagaactaggtatagttgtattatttggcctttataatgaatagtttttcttaatatcatttacatgtaatatgaagatattctgggatgttgaacagtcttccagataggtaaaaggaagggattcaaaagaaaatttgaatacatatttcatatttatctttttgtgagcttcgtaataaaccacacaaagctttcatctggaatacttattactaaaacttgcactgtagctgtagattgacattaacagggaaaaataaatataacccatttcccaagacactaaaatatgctaaatgaagtaaaaaatgtaaagtaattttgaaaacttaaattgatattgaaatgtgagttagttttatcttagtcaacatcattgttattgaagaaaggcagattttattcaccggaattatttattttagtttagattaaaagctgctttctgacatatgagttgactcctgtatctacttttctgagatactattggctgaaacatgttgattaaattttgtagtaacttaattacaagattcagagatagtaaagcttttaatgtaggttataattttataatatgaactgacatttctctagtgctctgcagttttcaaaatgctttcataagcattatctctttccatttctacaacaattttgcagtaggaaataatagtatccctcttttagagatggaaaagttaaagtttcagagagaataaatcacttagctactagatggctgaatcagaactcaagcatgtgaagagaggtagtatatagcatatcttaagaatcttcgtatcaagattaacagccttggagacaaaaggtctttgtttaaattcatactttaccctttggttgttgcgcgctcttgggcaactgagaaatctgattgggtctcagttttttaatctgtttaatgggatagcaaagttcattattgggtattgtgataagtaaatgagttgacacctagaacgtacttagactgtaccttgtatatttttagtggatgcccagtaaaaatccattgattgttgttgattagtaccaattcaaacgtgaagttgcagattgcagttatttgatgttttggtctgaattgttgtctttagtgagagacatctaacttaaaatagcttaagaaaaaaaaaagggtgacttattagaccactgagttgggaaaagttgctatactttcatacattcaaaggaaaacctgaatcttggattaaatggcactgaagactcagttcttccccaatctatatctctgttcatttcttctttctgctgtctctgcttcttcatggcctagcctcgttatcttctaccatagataggctttgtccagagtgttcatttttccatcccagggaagggctctgattggctatgcttaaaatttgcactggctctttatttccaaaagtattgttagagaaaatggggatatggatgtcatatggatatctctgtgtctaagggattggtatgttaccagaagcaattgaaacaacatggcttttggagaaaaactgaaaaaccagaaacaagatgataatgaaaaagatacaaagtagtatattctatctgactttctgcaaatcagaaagaaaaactgttaaaaactaagaaaacttggttttgaactgagttttgagatcagttttaagaattaagtcttaaaactaagaacacttagtttggaaaacctttgaatataaagctgccctataaggttttcagaggattagtgttccctcatgccaccatcaggctagcaccaggcagaggtatctagtgttgcctgacagtgatgtgcaggggagaatattgctacaacaacagacagaaaggatggtgatggtctgatttcaaaaacagatcagtgtaactatgtagctacttagtcaatagcaaatttcctagacattcttatgttttgctaagatggcagtagaagcttgactctgacagttgctccaaatgaagtaataaacctaacattctagttaccttgtcattcatctgtcttcaaggtggaatacatatatcacctttgagtgagcattcatattgttaaaatattgaaatgtcatccaatgccataattttcaaagcatgaaatttaaataaaatcctttgcccaacctctcaaatacctctgtggtctctggatgacactgtgcaaaccacaaacctatagaaatttcaggggaggttgaattaaagaactatcgaattaaagggttgatttgcagtaattaacatttcactttctgaaaaccccatatatttaacaacactattataataagttaacatgtgcttcagcttctttctcactctacaactggtttaatgcttaaacatttcttctctatacttggtatgatttcctccttttcttgcattatataagttctgcacttgttttcaatgtccaaacttgaactcatcacctgtccccaaaacctgtcttccttttattatgtctagctcagtagttgcgcaaatttgaagcctggataacacccttgaactttttctcaacccatgaattcatctttagtcagtcagttgactctaattcttaaatagctcttaattctatctatttatgtctaacatgatgcctccattgcacttttagcattaagtttaatttcttgacttgaacttctaggtcttttgtaattggttcttgttctgaatctgaagtccttcaagatgcaattcaaatagtgttaaaatattgcataggttgtttacataatttcacagaaacttctgacaaagaatatcctcaacatcatgcaggtagaagcatcataaaataccactatatgattaatctataagggttcatgaaacaatttagttaaaatatgcctattttcacatacttagataaattcattaattaatttttatgtcactatcttgcctggtataaagtaggaatttggtttccccccaaaagaataagataatgaatataatatatagctgtaaaatgaatatacaattgggacctggttagtgttacttctttttatggtcatccccacttactatagctgacaaacactggcacttgcttctgtttcttttcacagttaatattcattactgctttgtaatataggactttccaataaaacgttttcaaatagaaactatcctggaatgctcatatgttttttgttttcttttcatatatacaagagccaacaagtgcagtcattgtagatacttttgatcattgcagatggtcaaaatgatttttcaataatttagaataatctattcatttcctgaattagggaggctagtaatatcagctatgtttattaagcgctggagtcagttctattttcttgtaaagtttaggtataatgatcattaagaatcaccatattctcctgaatttcccccagtctttatatagacttttattttattattatatgtatttattttgagacagtgtcttgctctgtcatccagactggagtgcagtgatgcaatcacaatccacagcagccttgacctccatggctcaagtgatccccctactttagcctgctgagtagctgggaatacaggtgcacaccaccatatccagctaatttttaattattttgtagagatagggtctcactatcttgctcaggctgatctcaaattcctgggctcaagtgatcttcctgcctaggcctcctaaagtgctgggattacaggtgttggccaccatgcctggctgaatgaatttttaacgtaaatgtataaaacatgaatctcctctgaactttcaactgttgattccctggaaaatgaaggttgttgattaaatgcggtagtaacatatgtatgaataaaacatactgtatctgttggtgctatataggaccttgagagcacaagatttttcctaactattcattcttcacttttttagctttgttgcttaatatctattagtacttatttgatattttaaagcttaaggggactgagaaatgtattgttaaaaataatttaaattaaatgtaacaaaagatattttattatttctgatcttatgcaacagattttattggaggtggaatgaagtttgttggtaaccaataagatctatttcaaaatgtatagtatgaaatattttaaagaaaaaagaaggaaaaccagaaaagaaaaattaaaaaaaaaaaacaatgtcttggatatattattttttattttttgagatggagtttcactcttgtcactgaggctggagtgcaatggcgggatctcagcccagtccaacctccgcctcccaggttcaagccattctcctgcctcagcctcccaagtagctgggattacaggcatgcgccaccatgtccagctagtttttattttcttttgttttcagtagagacaggattttgccaagttggtcaggctggtctctaactcctgacttcaggtgatccacccacctcacctcccaaagtgctgggattacaagcatgacccaccacgcctggcctatcgtgggtattgttattagtggaactttcctttcttcaaagtatattgcaataactactaattttctccatgtatctagcaaagataaccccaataaaaggtattaaattataaagtaaaacctagctattggaaagaatttaaaaatagaaaattaaagctacccataattgtattacctaggaataaacaagattggattccattcattctagccctttaaaagtaaatatgtgcatgttgtcttagtttgggctgctataaaaaattaacatacactggatggattatacaacagagttgtatttctcaaagttcttgagcctgggacatctgatatcaaggtgtcagcgtggctaggttctggtgagggccatctccttgctgtatactcatggcagagaacagagaaagaaaaagcaagctctctcttgtcttttcataaaagcactaatcccactcgtgaaggtttcacggtcatgatgaaattacctttaaaggtctcaaatcctaatattacattgggaattagcatttcaaaatatgaatttttgtgggacacaagccttcagtccatagcattttttcattgcccacaccccaaatttatgttctcacatgccaaaggcattccttcaatctttacagccctgacgtgccagtgttacctctaaaatttaaagttcagagtatttaaaaatcatctaaatcagatatggctgagactcaagatactattcatctagaagcaaggaggaaaaattggggtatatattagccttttgatcttaacatagttacatgaatgttgatcattgtccaatattctattataatggctatataattgaatatttattgctctatcattctttattttataattctccaattgctgaatatattaagtttatttaagtttttactattataaataacactttgatgaacacatatgcatgtaaagtctatatttatacttccttaacatggattattaatacctggaaggaaaattactatttcagaggtaaagttttatcaatatcttcacttctggaaaacaccagtgtatgtggtgagaagggatcaaattgctaccctggtataattaatatgatatatttaggttttcattttcatttatatttcttatgtcacaaaaaacagaccttaattattatgtaggtactatacgagtgaaatgcatgtgttgttggtataaagagatcttggagctaagataattggctagaagtattgtcttcttgattggagcttgcatgattcatttcagatggttaaagtgtttataactgctttgaaagtttacataagagattagcttcatttaatttgttctagagtttctcagagtatcttcactactttcttttcttttcttttcttttttttttttttttacaagtttctgttgtatctctattgatatggtttggatctgtgtccccaaccaaatctcatcttgaattctaatccccatatgtccaggcagggacctgtaatccccatgtgtcgagggagggaagtgattggattatggaggcagttccccccatgctgttctcatgacagtgagtgagtttcatgagatctgatggatttaaaggtggcagtttttcctgtgcttacacttcacttctttcgcctgctgccatgtaagacatgcctgcttcgccttccgccatgattgtaagtttcctgaggcttccccagccatgtggaactgtgagtcaattaaacctcttttctttataaattaccacgtctgaggcatttctttatagcagtgcaaaaacggactaatacatctactaaatagaacacttatataaataagttcaattaaaaatatagtaatagtgttataggtagatagataggcttgaatggggaaggggagggttctccccccaccttcacccactagaaatgtcaagggatggttcggcagttattacattgcctgtctaaaagtgatacattgacagccagtgccagggataggccattttctgagggtccacacctgttaacattaaagtgtcagttaaagacaggcctcgggggaaacaacttgctgggcatgcatattaagagacagaaatgacgaagtatgatcttccaggtaccctccactggaaaaaggaagaaagccttagatgggcatgctaacaactccctaaacacactgcatgtgctcaattcccaagggtaaggaaggcactgtgcatgcgggaagcccaccctaagggaagaatcatgggaaagaggtgagcctataaagtcccaggatcaaggttaaagcttctcctttgttctcccttttaccttcaggcacccacttgcatctcttctgggggttctttcctttctttcctgttctaaggctttttaaataaacttccatttcttctctgaaagttgcctctgtctcttttcctgctttatgcccctcagttgaattatttcttctgaggaggcaagaattgaagttgctgcagacacatatggattcaacgtggtaaccttggagtaacttggatctcttccactgataaaaataacatggctggtagcacatttgtttttaaggtttagaagagttttgatgatgtcacttaataagaggatagaactgatcaattttgtacataacaagtcataatgttgaataactgtatttggaaagaaggcaaaaatccagaatttccacttcctgaattggtactatttgtctttccatttaagggttgatttgatcacagatcagggattcttaattgttggtcaagaatggttaaactcatctgttttttctagtgggtgtcatgattatttaacaaataaattaacttgccaatgatgtacatttaaaaaaaaaaaatacctgggttctgggattggaagagtgatcctggtatgtttgtgaagacacaggagagtggttatgggtagagcagaggaagcaaaaggagtactaatagaagagaaaataagaaaggtaacaggaggaagttttgtcaagcctactggctttaaggaatggacttttattctgaatgaactagtacaccattagaagttttgagcagagaagtggcatgtaatttccatcttttttttttttttttttttttttttaatttttaagacagagtctcgctctgtcgcccaggctggagtgtggtggcgcgatctcggctcactgcaagctccgcctcccgggttcacgccattctcctgcctcagcctcccgagtagctgggactacaggcgcccaccaccgcgcccggctaattttttgtattttttagtagagacggggtttcaccgtgttagccaggatggtctctgtctcctgacctcgtgatctgcctgcctcggcccccgaaagtgctgagattacaggcgtgagccaccgcgcccggccgtaatttccatcttaaaagcattagcttagctgctaagttgagaatatgcggtcggaaagcagggcagttttagtaagacatgttggaaatctgcttttcaacatgtaagatggtgatgtattgacccaggttgttagcagtgcaggtgttgaaaagcaagaaataaattttggagatagagccaaagtttttactagtggatgaggtggggttaggtatgactgcaaactttttagcctgagtaactgggaatatagagttgcagttatctaagttgaggattgatatggtttggctgtgccccacccacatctcaacttgaattttatgtcccagaattgctatgtgttgtgggagtgacccagtgtgaggtaattgaatcgtgggggccggtctttcccgtgctattctcctggtagtgactaagtctcacgagatctgatgggtttatcagagtttgctgcttttgcttcttcctcatttttctcttgcccctgccatgtaagaagtgtcctttgccttctgccatgattttgaggcctccccagccacgtggaactgtgagtctagttaaacctctttttcttccccatctcaggtctttatcagcagaatgaaaagagattaatacaagggtgaacgcagtaatgcaggcttaagggctgtggagaatcacaaaccatatctgggcatgttagggtatctggcaatttttagtaggcatttacttggagtgtggaatttaggagaggagtccctgctggagatatatacttggattttgtcagcttgtagagtgcattgaaagctacaaactgaagctattaatattaccatcattagattcaagaaatagtaaatacatggactcataaaaaatattttttgtatagtaatactgtctcagcaagtagacagttggagaaaacaagtttagattttgtgtcatcattatagagtcccataatctgacatggatttatagttaaatatttatgtgaagcacctattaaaaacaatggtaagatttattagaatgatataatttaggtcattcaaggttgccttgttcccctgtaccatctgttttcattttaaggtgtatataaactctaatgatataattttcaaactttatttattttagttttgctttcttgtctttccaatgtgcaacacattcctatttgtgatatccctcagtccaggtgaaagtgtgtggataaagatcttcccaactcacatgcccaacctccttccccacttccaccctaaccctcacctctttaatagccctttctctactgaaaatatcactgataaagtgactagctattttactattgcagttctcaaacaaaaagcacagtatggtggagagaacctttagcttcatggtgttttgatccgtaaatttaatctacatttttgtatgtgcatttacgagtgcttcatgaatgtctcctttttcattattaggtgctataggttgaacatagaatattaggactagcatataagccttgtattatttagttagtttgcagttgtgaccttatttctcgagtgctttcagatatacttcttcattagatgctcataaaagccatgtgaggtaggcaggatgtgggaaccccatatataccttaaaaaactgaggctccaagtgttttggtcccgctgaaggtacagagtttcatgacaaaatgagaacccaggtcttttgtatctaataaatatatatgtaggtgtgtgtatagtggaaatatacacatgcacatttgtgaatgtatatatatttcaatatatgcctatgtgagtgtgtctcctcataacaagacagatggtaatatatatagtgaaatgtgccagaggaaaaaaaatatattgttatctgtttatgtaagaatgctaaaatgtttgcaactgtctacaaagaaagaaattgttaatgtttttaattaacattcaaacaatttaaattttcattgtgtgattagttttaatagcttattttatattacttgagaatctaatacatatacctattaagtcattaaattcaaaatgactattcagaagatgcatatttaataaaataaaataaccaagtttgacaggttattttaaaacacttacagaccaagatttccaaaggtgtgtttaaaaagtaatagatggcatcaactttaactgtcagcaaagtcagtccttatggagttgcctaagaaatgtgattcatttgaaagtcatatttgataattctagggtaatattcaatctaaatttaaatttcatttacattaagtgaaagctcaaatttttatttttgtttttaattctgtggtataactctctcctttttggaaactaccacttggcttaagagttaatcatgattttgagagcactcttagttctgagatggaaagtaatatagtagtaccttcttctaaagagttttttttatgagtgaattgaatgtcattgaaggacagcagtggacatagttgagaaaaggaataaagacaaagattggttcacaaatttaatctaatgctaatgagacttcttatttagtttgtgtaaataaaataatacatgtaattagtgctgagcagcatatggaacccattgggaatgtgtatttctatgtgtatttcaagggcaccagagtcattttgtttacaagtacataaactgtaatgtaactttccactacaggcggcaacatcttaaaatatttcacacatatctgtttcctgatgtattttaataatcttcttccccaaatattaaatttgaattctactcaactttcagttggactctactcttaagtaatattaaaatgtttcatgccctttttttttgagatggagtcttgctctgttgcccaggctggagtgcagtggtatgatcttggctccttgcaaattctgcttaatgggttcaagtgagtctccggcctcagcctcccgtgtagctaggattacagactcacgctaccacacctggctagtttttgtatttttagtagagacagggtttcgccatgttggccatgctggtctagaactcctgacctcaggcgatccacccatcttggcctcccaaagtgctaagggattacaggtgtgagccaccgctcccggcctgtttcataccattttatttattatatctgtaaatgaacttatgctagtttcatgcctgaccctccatatgcattcaacagaagcttgcatacatgatgagagaatgaattcctataaacattgaacattcttctgtaaaaacttcttgatcttgcaggttattataacactggtatttcaaaagacactggctctagttagttttggacgtcaggtttttagctcctagggcaccatattcctctcattcctaattttttctgtttcattgatattttactgtactatgtttatccatttgtgaaatatgaattaaacattaacttttgatatgatttgatcaacatacttactaatagatgtcaattggaagtgaagataacacacttttgattgtagaggaatgtgatagtcattggttgactgagtggaggatttgagttataataaaaaaaagattactatcttttatttagaagacagattccttgggaagcagaggcaggtggatcacgagatcaggagatcaagaccatcctggctaacacagcgaaaccccttctctactaaaaatacaaaaaattagccgggcgtggtggcgggcgcctgtagtcccagctacgcgggaggctgaggcaggagaatggcgtgaaccctggaggcggagcttgcagtgagccgagatggcgccactgcactccggcctgggcagcagagcgagactctgtttcaaaaaaataaaaaagaatcagtgcttccacatttctcactgtgtcatgtaaaggtaatccccactaagagtcgtgtaagtagctaactcactaaagtgcatgcaatctgttgttgaacctcaaattttaaggaagcaagagatagtcctttgactcctcagccgtgtggggtgtgtgtgtgtgtgtgtgtgtgtgtgtgtgtgtgtgtgtgtgtttaagcacatataggtgatgagtattagaagggggaaatcttgcaaagccacaccacatcacaataaaaaatgtgctattcttctgagttgactctaatggtagggtatagatcccggggagtcttggaagaacatctttatgatttaagatgtcagaggttttctgagtaaaggaaatgttccagatcatcattctcttcctttttctattgagctcatcattctcttcctttttctattgagctcatcattctcctttctctattgagctcgttaaaagagtagttccccgcctttctataagatcacgttaatataatcagagactccacttccaacaggatgatgaaaatatatgtttatttgttttaagctggatttctaatgtttgcataaatgagtaaccttgaggaaaatagcattactattcattctcctttttcttcttattatttttttctgttttgaaagctggaaataagcctcagacatagccttcccttctaggttttcttaaatggctgtatgttagcacatctttatctacaaaagtagatttaggaaattaataacccaattaacattgtaaattaaaggtggtaacacacttgttcaaatctggattgattctaagtctcagacacttaaatttagagattttggcaagaaccaccaagtggctgaaataaatgaagaaaacaggaacagtgccaattagaacactggaagaaacccagaattcagtcatttaatgaagtgtttaatattgcagagcatgttattgtgatatattttatgtcaaagtgctaaatatatttgatcatttcaaatgatctctgccaccattttataaagtgttcatgtttggaacactcatttcaccatacatatttgtaggttctgtaaaatttgaagccattaattaagattgctaattttaaatgaagtatttttcccagcttattatactttctaatctaaacctcatataaactaagaaatagacccaactccaaaataatatatttagaaagccagtatatttagaatccaaatatatgtttattgaactaaatttgacattaatttatgaacaaatttgtgaatatgtgaaatatccagttttttaaagttttattttatttagaattttcacataattgtacatatttatgaggtacagtgtgatatttcaatgcatgtatacattgtataaggatcaaatcaaagtaattagcatatccattactttaaacatttgttgtttctttgtagtgataacattaaaatcctttcttgaaatatacaatacattactactagctatagtcactcaactgtgtgatagaacacccgaaattattgttcctaagtgtaactttgtaccctttgaccaatctcttcctatctccccatgctttcccctccctagcctctggtaaccattatgccactttctgcttttatgagatcaactattttagattcctcatatgagcgaggtcatgtggtgcttgtctttctgtacctgtgtaatttcatttgttataatatcctccagattcatccatgttgccacaaatgacaggattttattctgctttatggatgaatagtattgcattatgtatatttacatatttttttcttcattcattcataattggtcacttaggttgattttatatcttggcttttgtgaatagtgctgcaataaaaatggaagtgcagaatctccttgacatattgatttcctttcctttgactatatatacccagtaatgagatcgctgaatcatttgatagttttctttttaagtttttgaggaatctccatgttgttttccatagtggctgtactcagttacattcttaccaacagtgtgtaacagtttccccttctccacattctcatcaaatttgttaatttttatcttattgattacagccattcgaagtgggttgaggtaaatactttattgtggttttgatttgcattttcctgatgattagtgatgttgagctatatatatatataatgtttatatattatatatatttatgtatattatatataatatttatatattatatatatttatgtatattatatataatatttatatattatatatatttatgtatattatatataatatttatatattatatatatttatgtatattatatataatatttatatattatatgtatttatgtatattatatataatatttatatattatatgtatttatgtatattatatataatacttatatattacatataatatttatgtatattatatataatatttatatattatatatatttatgtatattatagataacctagaaagatatatattatatatatttatatattatataatatttatatgaatattattatataatatatataatcttatataaaatatattatatataatatttacatataatatatattatatgtaaatattatatattatatataatataatacatttattatatattatatatataatataattatatattatatataatatataatataattatatattatatataatatataattattatatatgatatataatatataatataatataatatataatataatatataaattgtatataataatttatatataatatataatatatattaatatattatatataatatataaatataaattatttatatattttccgattgtatgtcttcttttgggaaatgtctagtcaggtcttttgcctatttttaatagggttttgttgttgttgttgtcgtttttcctttttttttctgttgagttgttcgagttgctcatattttggaaattagcacttgtcagatacgtagtttgcaaatactttctcccattctgtaggttgtttcttcactctattgtttccttagctgtgcagaagtttttagtttgatgtaatagaatttgtctatttgtgcttttatttgtgcatttgaggtcttattcaaaaaattattgtccagaccaatgtcatgggagcttttccttagttttcacctggtagtttaatagttgggatcttacatttgccttcaatccattttcatttgatttttctaaatggtgaaagatgaggtctagtttcaccccactgtctgcatgtggatatttagttttccagagccatttattgaagagactgtcctttccctgatgtgtattttttggtgccattgtagaaaatcagttggctgtaaatgtatggatttatttctgggttttctgttttgttccattgttgtatgtatctatttctatgccagtaccatactgttttggttaccataactttgtagtgctttttgaagtcaggtagtgtgatgaaatatccaggtttagaaggaagtaaaaagtagaacacaggatattatggactgggaaggttaggagaaagggaatgatagaaaatttttaaagactataaaaatacaactagacagcaggaataagtcctagggttctataccacaataagatgactatagttatcaataatatattatataattttaaatagcaaaaaggaggaatgttcccaacaaaatgataaatgcttgagatgttgtatatgctaattaccctgatctgatcattatacactctatgtatgtacacatctctatatacctaataaatatgtacaattatgttatttttaaaaataaaatacaataataaaaaatcacatgtagcccataaatatatataattattatgtattgataaaaaattttaaataaaaaaatggtattcactatttctaggtcttaaaaaattttttaaatctttaattttatagaaaacccaacaaaatatttcttcaaaaaatttgaaatgactatttaatatataggtacaaaatatctgatatataattcatgagaacaccagacaccagtttgacttataatttgtctttcatattcttttttttttttttttttttttttttttgagatggagtctcgctctgtcacccaggccggactgcggactgcagtggcgcaatctcggctcactgcaagctccgcttcccgggttcacgccattctcctgcctcagcctcccgagtagctgggactacaggcgcccgccaccgcgcccggctaattttttgtatttttagtagagacggggtttcaccttgttagccaggatggtctcgatctcctgacctcatgatccacccgcctcggcctcccaaagtgctgggattacaggcgtgagccaccgcgcccggcctcatattcttaattctataacaattacaacaattcatggtatgttgttattaaagtgagttttatagaggaaggctgttacaatatctcatttttaacccatgtattatatatagttatcgttttaatagtaactgaaaataggaaagtttagatacataagtaaatatgtgcacacacacatgcatacatttataaactgccttttcttaagtgagaatttcacattttcaaaaaaataattgtgtatgtaagagttttgtttttaccttactgtcaagagagttcgatcattatcatctggacaatgggctaaaatgtaggagttgttctgtcttataatatcagaaaaataaaggacctattttatttcatagatgaattaaaacacaaaaatatattaatatagtagcataattttaccaggggcctgttactttctgaattggagtatctaaaggaaatttggggtactgtgttctatttacaaatgactagcaagactgattccgggatgaatgaccctcctttattcatgtgctctgtataaaggagaattttgtcattaataataatgattgtaatactgtgtgttgaatgtaaaccatcactactttacacattaaaacctatcctaatttaattaataaaattagccatcgctgcatcttcaacaaaaaattataaaattcttatctggattgattaaatttagttgagcccttaatcctgatcattctgcttgtttttgataaataatttgaaaataaattcaaattcattcaaattacaccttgatttcaagtaggaatagtttaatagtgttccaaaaaaaggaatgttaaactattgaggtattcttgacaactcttagagctgatgataagaaggttcatagataggaaggcaggaatgacttattattaagtcatctgagtaaatctgtcattgaaacctaacatagcatagtacaactttgagcaaatcaagactctgctgaatgccctcagttgtaaaataatagtgttgtactttacaatcactgactgagccccattttagttctttcataattatttttggaaatagtgattttcattttgttaaaaaaacactattggcatgtataacaaataatttataatatcttccccaaaagctctcacattaacccaaggaaggcattgaacatgcaaataaaatataattcaaagtctgtgttaaatcttgagactcaaagctcctatgtcccaaatgtgttgggtctgtgacacatggattgtcaaattcagaatcagagtaatgttttgtacaactagtagctccagcactgttccctgtggtctctggatggaagaggcagtcaaacagatgggtcctaatagccttctaagacgtgaatcaaggagcctcatcagcaaggctgatggttgccttttacattatccttgtgatgaacaaaacccttgggcctgactggcagcttcttctttacctcccttcacttcaaggctttccaggatacaattcccaaaagccctgaatgtactcttccgcagagggaaggctgtagaagtctttgcaagcttcatacagagaaatacaaaaggtgtgatgccattaactggtcctttctaaagcattaggaatttagtgaaactctcaaacacaaaactgaaaagccatttgaacaaatctcatatacttgtagataagctttttttatttaaagcatacaaattcaaatctttcaagcagaaaattcagtcaagtgagatccattggtggtttgagttcaaagtcagtgagcaaatggaaatcattgcggcatctctctcatttccctagtggacattagaccactcaaaatgtgtcacataatttacagccccttggtagtaattgaatatacacgttgagagtgcactggcagaacacttaagaaagattgaatgcaggaggaccagcttacgttatttttggctctactctggtttttgcttttaatgttttttcttgagattaatttcaattgggttgttccatcctattcaaacaaatgctttgagagaagagatgaacagcagcatcaaataaattgtgatatttagtttcagagacatcaggtgttgtaatcaaataagacagaaggacaaagtaaaatctgtgatttgccataaatgaatttaagctgtaagaatagcagaattgagaggtagattagcaatatgacttttgaactattatctaaatgtagggtgagattttcaagatttattttaatatataacatttttgctaatatttaggaaaacaaagaattttgtagttaaaagtgtgaaacattaaaattatctgtctttaaatattaattattctaaatctctcttttgtgtatctgttactagacacttttaattcttagacacatattttatgaagagttattcttaaaatggtatgctttgtttgccagtcaacatggaatctccctaggtataacctttaatatttaagagaatacagatcaaaatagtagagatttcaacttgattttataaagacgtccaagtattctgaacttataataggaaaatgagtcctgatagaaattgtcatttgaaaatttccttccttctcctctttctcctcctccttcttcctcagagcgagtatgtggtatccactgtgtacacgcacacaacataaaaaaatggaggtccgtggtacaatatgtgcatgtgtgtttgtatgtgtgtgtgcatatatgtatacacacacgtatatatatatatacacagaggtatatatatacacacacatatatatacactaaaatttcatatatattaaatataaattatattaaatatacaacatatatattaatctttacaatctgttacactcttcctttgagtgcccagattaactggctactaacatttactttaatatattgctttttattgagacaaaaacagtggaaaaaaagtaattaatcacaaactacttataaagttaatattttcccatgctgaagataaatgagaacatgtgcaagcaacttaatagcaatacaaatctatgtgagtattcacaaggaagaatttctctctcagatattttgtctggatttcaacttgctaagtagactatatacctaaaaaaatttttttaaggcacgacatttctttttctgctatttaatatgtaaataattgcatattaagaaataattttttgcttttgcagataaaaggatgaaaacacagactcttagctatccaaagcaatcttatcatattcatatatttatttgctatatctaaacatacatacatatttacctattaactttatcttacttccaatttacttttgtttttctcctgatatcttagcccctttatctttaaaatcttaatattgttttcttctaaatcagtctggtgtttttttcccctttcctcaagtttttttttttttttttttttttgagacggagtctcactgttgcccaggctggagtgcagtggcgcgatcttggctcactgtaacctccacctcccgggttccagagattctcctgcctcagcctcccgagtagctgagattacaggtgtctgccaccatgcctggttaagttttttgtttgtttgtttttttgtttgtctttagtagagacggggtttcaccatgttggacaagctggtctcaaactcctgacctcgtgatctgcccacctcagcctcacatagctcctcaaatgtttttaatacttgttaacctgtcaccaaaccaaaaactgtctttcatttcatatgtgacgtaccatcattttaaatcttttatatgtattactttgctttccataacaaattggtgtttatatggtagatagaagtcattgttcatgacattcgtcatttagtattaagagcatctttatgcgtgctgtgtataattcataatagttaaaaccaattcataatagtaaaaaactggaacatttctcagaaaaagtaatatcaccctcctttttaaaacaaagctaaatcctgttaattttcccttggtgagaaatagcaccacacattacagcctttaatggcttaaataaacatgtataatgcacagtataaatttgaaaagtagtcaaaatcctctctatcctccatctttgaacaaactgtgctgcctcatttgcagagatttgcagtaaaaatcaaagatggcttacatttttacactatgtcaatatttctttctctgtttcctgttacttacatcagaatgatgggctcttttcgtaaagcagtgactgaaggccaaaagggaacttacaaaagggcattatacaaattctaaatataaaactccccaaaaagggaaaatgatgttcagatacaataaaaataaattatagaataaaaatgagaaaagttatagtcgttttttgtacaataatacagtgtataaaggctaacgtcagtaatgtcaactttgttgaatggaaaatcctgaactggcagttgactctatttctgtcaaatcctgcttttatgttatgtcactctctgattactcagacctttctctatcctactatgaaactgaatgattctcagaaaggaaccaggacattctatcacttaatgccaaacacgttaaaacgaaagctatgaacaggcttcccaacattttgtagggttaaaaaagaaaaaagaaaaaaaaacttcaattaactcaaattgaatatgttcacaaatctcaaatgcacaaatgaacattttttataacaggtttattctaataagtcaaatccatccctcatacagatatctccatgctttatgaataatagaatgatgtgaaaatataaagtagggttcatgaaggtgaagctgaatgcaactagaaaagcaactaccaaaataaaaatacggaacacagtggtagatagacattactatggcaacctccgatccttactaagaagttagtgatcattgagatctttctgataacctgattgcttttgttttctcattcacctggacaataaatacttactgagtagatatctctctcgattatagcgactgactacctagtcatggttccatgctctcagggagattacagtcttgtaatggtaaacgcattttcaaaataacaagaaattcacctccgggctaaaattattttttagctattgattattgtttttatagttcattctaagtagaggggacaaggttattatcatataatgtgacttgtattaagattgctaaaagcaggggggctgatttcattcaaagaactgtgggagagaatgcctcactctcaacttagtgacatgacttttgttttcattacatttaaatacagctttgttttcctatggcggtaacccataacagtatgaagcacagacagtgcattattcaggtttaatttgggcatggttgaactgctgggagtgactatcaattacactggtattttaacatttgtatgaagaattatgtgccaaaatattctaaaatttaaaatttcatagagaaactgcttgaataagtgttccatatactcactcactctgaattttttggcatctgaatgtgtagaaagtttgcaggtgaacatgtgcttgtcaatacattgtcactgacctcctcccattcatgttgctggtcattggcaatttcttcttctggatgctggaattttttcactgagtcctatgagaagctattaaggggccagagacccaatgtattcggtctactacccactgtcccatgtttttcatccctatcagtgtaagtgatctgtcctgagagcaccgtcatctattaagcgaaatgcagatccccgggactccaagtaaaggacattcaggcataattgaggtgaaatatatggttatggacagagactctttgaaattttactgaatattttggattcctaaatggttaccttcaagacactgtgagtagcatatacatgtgtgtgcttgtacatttgtacaagcacatgaacacggaggtaacataaatgcatttcatcccagaaaaacaaggataataataatgataagtcagaaaactaaaagctaagtaaatactttcaataatgaacttctaatatttcaagcactgtttattaattaactttatcttcaacagcaaccttgtgttaggtaatagcattaccattctgtagaggagtaaactgagacgcagcaagattaagttatatgtgcaaggataaatagggagtaatggaagagccggagtttgaatctgaataatccaacttcaaagtgttaatcaccactccaggctgcctctcagccagttgaacctcataaaattcaagactataataagtggtcaaaaacctaagacgaaactctgcttacatggttatttaatatttgattgacaatgaaaaataattttaatgcataaagtcatgttgaatgtaactacaatattaaagatcataaagagtaaagtaagtaaaatagaaaaatcaaaataaaataaaaataattatgtttaagaaagaggattatgctgggtgcagtgactcacgcctctaatcccagcactttgggaggctgaggtgggtggatcacttgaggtcaggagttcaagaccagcctggccaacatggtgaaaccttatctctagtaaaaatacaaaattagctgggcatggtggcatgtgcctgtaatcccagctactagggaggctgaggcaggagaatcacttgaacccaggaggtggaaagcggaggttgcggtgagccgagattgcgccactgtactccaacctgggcaatagagtgagattccatctttaaaaaaaaaaaaaaaaaggattataataaattcagctacaaaagaaggaactaactgggtaaagtttaacagaggaaggaaatttcaagatactaaaagctcatcaggtaaacaattttctatctcaagaacaaatgataccagtgcacaggaatgacagaaagaataacaagatactaaattggctataatcagagacctgaaagtcaaatgccaaagccacaaagagtggaattcaagccagagccctaaagaaaaaatagcgtaacgagagagagccagcaaaaagcaaaatgaaaaagacgcaactcttgtcatagcacacacatgcaccgaaacaaaacaaaacaaaatgcaggaaaaacagtaaaaaattatctagctgtaaaaattacttggctgtacagcctcaattgtttgctccctgatttagaaattatcatatttgccaaaagtttgaatggaaatatacttttacttagcaaaacttccattattaaaaaaaaaaaaaaaaaaaaaaaaaaaaagctggccgggtgcggtggctcacgcctataatcccaacactttgggaggccaaggcaggtggatcacctgaggtcaggagtttgagaccagcctggccaacgtggcgaaaccccatctctactaaaaatacaaaaattagccgggggtggtggtgggcacctgtaatcccagctactctggaggctgaggctggagaatcacttgaacctggggggcggaggttgcagtgagccgaggtcacgccacttcactccagcctgggtgcaagagtgaaactctgtcccctgccaccccctggccaaaaaaaagccaaggtaaagagtacaacatttaagaagaaactttctgtaaacattgtaagaaatctatttaagaactaacagttgatatgcaaattgcaatttagagatcctgaatgaactaattaattaacaaactctcatttgttaagctgaagttaagtgatatgcttaatgaaaaccacagttatactgaagaggggaactctgtgtttaagtcttttcattaaaccagacagagcctaatcaatgaatatgtgtaacattgctgtataggtctgattacatgtttccttgtttttctaaaatgcttaacattttattctgatcttatactttaacaattgaacagcaagatgggctgtctataattcaaatttaattgtctttaaatcctaatctctaaacagtctgttaaatagaatgccattgattaagtgatctacaattaaatcagtgacataaaatccatatcagaatttaaggatttaaccaggagttctctaataagtttatgtcaaatataattcttaacaaatgctttctgtatacttttaagttatctcaaaatcttgaatttgaaatctttaaacatttacaggttccaggcatgagaattttcctgggggatgggggagggagaacaggaacctgggtgagtaaataatatgatgctccaggtttgtttctcctcagctgacatttatctctttggcatgatgaagggtagatcaacgttgactgtaaaaacaaacacgattagcactaacgcagcatatgttaacactgctgcagcctaatgatgaatgagctgtaagcgatcccaacacctgttcttgatgatgatgcgtgatacccaaccccagtggagtaatgagagcgaagacacagcggtgcacatctcaccgattacagtggtttatggaggcgttctggtagcattctcactttctgtctctccatctcttctctgattattctatattcgttcattcattcataacttcagaattggctttaagctatagaaatccacatgtgaggtcttacatgtattagccacatgagacgtattaggttacccaagtcctaagcaactggagaatatgtttttataccagaataattctttctaaaacaccattgttaagttagcctacttggttctaacgttgattgacattatcaagcatctcaactcgattggctctaaatttggcaatgcctgaagagagtttgataatctcaaaacagaatacctgaacttgtgtgatggtgtcttttatatttaatacacaaaatactgaacataagtatgaatattatgtaaagtgacaaattacgaacaatggagttctgatattatccttcggtcttgtttcagcaaggaataaatgatattcctatctgccgcttctacgtcatttaatgttctctgttattttatatatggtgccaatgtcccatatgatgtttctattactatgactatataatgtgaattacttcttctattcttaattttatttctggttatcctcttccttactgcttcaaaactttgttgttgataaaattttctttcctgttctgaatataattcctttacctgtgtttagatcatccttacctggaaggacttgtgtatgcattatttcttcccattttgaagcttttactcttactttccagctgacacttttgctctatttccaaatttgtcagagccttccattcttaaagaacattgtgtttctaattcttgtcttattttttgatgttcttcttcttattagcaatttctcaaacaaatggccaaattcattgctcttatgtcctcatattttttctttttaactcattgaaattattaaagaaatgtcaatatttcagattattaaacatttactcttgcaaaatttgtgaccattggcttttattatattttcttatagttttgcttaatatttattttaatgatcaaataataagttctaaaaataaggacaatatttgttttatttttcaatatttgttttatttttattttttaaagacctatgaagtagatgataaaagtgtaggttctggagctagattctgtaagttcaataccttgtattgccatatactagctgaatgatcatggggaagtttcttaatccttatgatgtggattgtctcatttgtaaaatggcaaataacaggccaggcatggtggctcatgcctgtaatcccagcattttgggaggctgagatgggcggatcatatgaggtcaggaattcaagaccagcctggacaacgtggtgaaaccccgtctctactaaaaatattacaaaaattagccaggcatggtggcaggagcctgtaatcccagctactcaggatgctgaggcaggagaattgcttgaacccacaaggcagaggttgcagtgagccaagatcatgccactgcactccagcctgagttacagagagagacgagactagttcaccaaaaaaaaaaaaaaaaaaaaaaaaacgacaaataacaacgtatagttcatagagatattatgaggaaaaataaattaatatatgtaaagagcgttgtgtagagagtaacacatagtaggtgtcctatgtattttagctaatgttgttatttagctcttgttattggtaccacctctgtaatccttgaaactagcactgtgcccgatatatattaatttttgaccaatattttgtggaggagtgagtgaaatgaattaatgaatcctgcatttaacacaactgatcattatacatttttagaacaattgtgtcttttgacttccacactaataatagatattactggttaaaacataacctttgcaaaacaaaatttcatttctaactcttctatgttagtcagtagaaaaactactctgcaagtcacatccagggaaaaaggaagatatttaagaatggctgaagataaagttactgtgacaattgcctcctcttccattcttataacgttgaaaagcattctcccaatggcagccaaaataatcatttaaaaatataagtcaaacagacttctaactttgcttaagccctcttgtagcttcctattgtaataagaagagaacccaaattccatccatcctgtccagtcaggccctgcttatcctggccctgcctattactctggatctatttgaaaccataagtttcagctggcatgcagcagaaaatcacagtggcctctgtgatttgaagaggccaaacttcatttctgccctggacacttgctattcttgcctataatgctttttttttttccccttggatttggatttggctgacatcttcttgtcattcagtttctgttgaaatgtgctttcctcaaagtcctccttgatccaccacctcccccattctattatgcattgttcctgcttgattttcttcgtatcactcgtatcactgtctgacattatcatttcaatgtgtttgtttatttgcttctcattatctgtctttttcactagaatgcaagttccatgatgaaaggagccttcagtgtctgattcattattttggcccactgcttagtacattatatgttattattaattatctgttaataaattaataaattaggctagaggcaatgcccttattacaaagagccttctttgtcatgttgtagaagtggaattgtattccaaaagtaacagaagccatcatagatggaaagttgaggctgggcacagtggctcacgcctgtaatcccagcactttgggaggcaaaggtgggtggatcatgaggtcaggagttcaagaccagcctgaccaacatggtgaaaccccatctctactacaaaatacaaaaattagcccggtgtggtggcacgtacctgtaatctcagctactcaggaggctgagtcaggagaatcgcttgaacctgggaggtggaggttgcagtgaaccaagattgcaccactgcactccagcctaggtgacaaaacaagactccatctcaaaaaaaaaaaaagttgaagattggcttatgcatgtatgaaaactttacaccagacaaagggtttgagttgaagaacaggtcaatttatggagaagggagaggtacattccggggggggggggtcttagagtgacaggatgctcaaagatgccataaggggtgatgtgtgttctggacatggtgaatgagtagctgaatctgcctattgcataagattcttttaagctagtagtggtagaaagattgaaatggcggaaaggagttacaatatcggctattctttctgggcaaagtgatttggaattgtcctccaacaagcatttgttttttgaaaagttattccactgaaagttgacataatgaaaatcataagaaaaatcatctatgggtgtaccaaagtcctagcggttctttagagcccagcttaagaactccatccttcatataaccctccccaataagaatgctgcaagaatgtccaactctttcattttatatgaatccagattcgagaacgtactgatatccccaagatcacagatgattaatctagggttaacagctgtaacatatatgttcagagtataatattcttaaacagaatcccccaaaacttgtcagcattcaaattaaaacacacataccacacacatacacacaaactctcatgtcccattgaaaacttctcactaaaacatacatcaagtttccaaaccacttcactggtggttttgagtcatatcaagaaccagatgccctctcagtaaaaaaacccaatgaacatcttattcataatggagatataggggtactagcaatggtccaggcatgtctgtcaaaataaagtgtctttcccctttaaatatctttgtaaggaataataaatagttctcctaataacaaatattggccatggaaagttgttagggaccacccacactatgtaaataaatattgtaaaactagcatcaatgtttgtttttgtaattttaaaaattttattggaacatctgtggaatataaagtaacaaaaggctcaaaagattttccattttaattaagggagaaaagatgcacaaaaacttcattcacaagcaaagggatgtgtatatatttatgatgtgtaaaggaatttcttgacaatgaatatctacttgtccttgcacaaaaatgattgtgcaaactttaatagcatgaagataatatcttttctttctagtgtttagtgcagttcttcctttcttcaattcccatatgtaggtaagtacaaaaacaaacaatagaaccaagcacatgttttaaattttctaagtgtattagatctttcatcttatttggtctttacacaaggaatactgtagaaccctgtctgcaagaacctgaaaattcctccatgtgacatggtgacctcccaggaaaagcacacctagccgaccctggataacttttgcttttgtctatttttatttgtgatttctaagtaacatgtaatttaagcaaagggactattcacgttaaatggaaaaaaaaaaaaccccacttgaaaagccctagtgtagaaggagaagaactagagcagtttcttgttgcatttgggatctggtctggccagcctttccactgaaggttgcgtgatcttgggcacgtcttggaacctgtctttccctctgacggtgctctctcagagagctgctaggggcggtaaatggctacgatatcaaattgagctaaggcagtctaccaggtgggtctttataaatcttgacacttttaaccatttcatcagacttttatttttgtaaggcagatgactgtaaagaaaatgaaggtagggattgtatctgcctttttctagtatgtgtctaacagagtagatacttagacatttcctgagtgaactcatgaatgaacaaaggcaatagcatttgacatggaaagttgggaacagatataaaatcctggatttaaaatgtcagtgagggttgaatatcctactgtggcttgaagacgccttactgctatgtcacatgcccatattccagtgccaagaggctaagagacttccaccttttgagttttggcagtggcaagaaggatccgctggggaaaatgagtcgagaagaacttccttcaggagctattgtggtagggctcttcatctgcctattacatatctgtagggaaagagcaactattttgatcaatcaggacaatggtataaagttttcctctgtctgaaaaaatatgttaggcctttctgtgttcatgaagagagctttccatctagcagataatattcacagtcaaatatagtttaaaatataccaattcacagaggagattcatctgtcttttgtggccctggtgagtgcgtcataattatataagcacacaaaacttcttctttgataatgatttgcttcctggcctttccctggaagtagaatttcatgcagcctcttggaatttgttctcctgttctccatttgttcagcctcacttgtaactgagagagtaaacatcttccataaaccccaatgtttatgactgactagtcctcccaacttgcttgtcagttgtattgattttatactccaggcaaccaaaccaatcatatcttaaggccttgctttaacaatataacaccagataaaactgcttctgaggacttgtggtttttaatctctaagataggcatgaggcttgaacgtatagaatatgttactttcaccttcttgcaagtttcatcagcaatggtacacagtacactagatacatctaaattatacccgtcttaggttgtatgttgctgctgctcaatgttacaatataattacatttctgttttcttctttttccaaccacatttaactgtttgggagttaaactcattattcacaggccattccaaatgcttttggaaaaacaaaattcttctccctaataacagtatatattcatagtaccagatttaacaaccattcatggctggcatcatcattattcaccttttatacatgaggcaagggggactcaggaagtttagaagtctgtactacatttttctgataatgaatatttgctatggaaaattattaggggccacacacactgtgtgaccaaatattacaaaacaagtaacaaagtttatattcacaatttattttattttattggaataactgtggaaaacaaagtaacagaagattaaaaatagaacctagcagagcaaaaaccagaccctgtttctcgcctctagagagcattccagagtgtctaaagaatgtccctgtcttctcactgtccctgaacaacctttccctgataactgaccagctcgccctcattttcaaagagctaactctgtcaaccaagggaaaaagatctttcagtataattttctacactgaccacctgtctctttccatatttagacataatttgtgctgctaaataaggttgccccctagccatacagactaaactctgaatttcaagcagatactttgtttataactgccttaagtcattagttctcaggatgagaaaactagttattttaagtaccaaaaatttggtagcagaccagagagaatttttcctctttatttaacgcccatgggcaaaacctcaggatgctgccatttgaatgcactgccatcgagtcagggccttcaccagaggcgcttttgtggctctccaccagatgaagtcaggcactccaacactctaaccacggtccgcagatggtggcctgccaccaccacatctgagctcccaggatttaaaggactcaactatgttccattcctgcccttttgtgggtttcctccttcaccacctctgagaaagccacagtgtccagaagaaggaggcagtccagcatcaacagtcagagccctctgcagcctctctcaccatctcctctccactctacccctcagtctgtaggtcaagaatacagaatgaatgggaaaaaaaaatctcccactagaccaaaccccgtctgtgattttggctttctacatgctgttaaatttttgcagaaaatgttcttttctcttattctatttcccctctttctaccctgtattaggacttgtttgagtgtctttccaagtggggatccaacatacacacgtctgtatttgagtgtatattgtacatgtgtacacacacttacagacacacatatatacaaaaacataaatgtgtgtatatatgtatatgtgcacatatacacacaaatatgtatacaaatgcatgtgtgtgtatatacatacacatatatataatacacactcaaatataaaagtatacagtcattgattttgttaggataacagctatttttagactcctattctgaaggctaacttgtggttaatgtcattttttgtccaatgacagaattacaacagcctgcccatttagtttagtgtcattccagaatgtttattttgggaatcatattatcctgacttcactctggtaatgtgaaagtttaacaataactctgctacattaattgtgttatttatttttttaacacgtcagagctagaactggaaggtttaaatggctaagagacaataaagagaggatgtgataaccatttctaggtgcatccctatgttaatctccaattagagagactgcgtaacatgaacagggacccaggacatgtacctacaaaaaataaggtacattagttagagttaaagtctgggttttctacctattaggaagaggtaaggaaataaaaggcccttaatatatttattctacataattcagatgtagtctaaaatagttgcaattagtgtgagaacaaagaatattatccttaaaaattctgaaggagagacagaataaatgcataggtctattctaagcacaaaattggaaaaatttgaatactgtactgtgattaggcttgataaatgctaagatgattaaaatacagttctcaccctgagagagtgcacgtgctggtttgggggaaaaaagtaatgagtaaataattacaatccagccatatgacccaaattcttgaaaatattgaacaagagccattaactctctcgggaaggttataggatattttccagaaaggagttatatttaaccttcctgaaagtatgtgtgtcaacagaggaagagcaagggcagctccctgcagaagacattccttcctctatagactacagaattagaagtgtctcctgaaaagacactttccttatgcgtgccactcagaggagccattttgctccagccttcaactcctcattgctagtaatttcaaatacttttcctggaattttgtggttctctcagtgattactttcatattgttttctcttttctgtcccatttctgctttgtttagcaagtaccagtaccagtaatagcttactttatagcaatttattttcacaaaaacccgtcagagactttaatagctatgtatatgtcctctatctttgtattcatggcttctagtcattttcaagataattgcattgatccagttattgagctgtgtgcattcaggagaacatgtactttaaccccaacctaattaataaaagctgcttttggtgatactgtgtgatggagaccatagagacatggttttgttgtagtattgttgaatcagaagttctcgtgaacatgtataatacctctccggggataacgttggttccaccagcatctgtaagaggaatgttctactttgtctgaacattctgcaccccagcacagaaagtgtcatggagatgaggttttgtacaaataactgaaaaaaattagttgagacgaaaacacgatagactaagttatttatacttttctaaatacttaatctaagcatacataaaaaattttaactaagatttatttaaagctatttagtcactttttagtcttaatgtttgctactaatcccttcatttatgatatttataaaacatttagccaggagctactaggagacaaagcaaaacaagcattatttcccttttctatgtttcaggttggtgcaaaagtaattgcggtttgtttcactgatttgtttctgtgtccccagtgggtcctcttgctatgcccaatgtccttggtgatatccagctcaacaaggggcaggcacatgtacatgttttacatgtaagaaaataatacagaacccagatgatacctagtgaattatactaagtgtattgtacaaagtaatgagatgagaactttgatgaattaaaaatactgttttaaacaaagatttcaagttaaaacttatattttattctctcactattaaacagtcctgcttttggagaggtgactttttttttttttttttttttttttttttgagacggagtctcgctctgtcacccaggctggagtgcagtggcacgatctcagctcactgcaagctccacctcccgggttcacagcattcttggagaggtgactattgattgattgtttaagtatttcaattcccttctagtttctaagctgaaatctgcatcagttcaggggacgtggccatcctttgtggtgaggcttttctacttcacaatagtgctcattaatatattaaggactcttctctttaaaaagaacaattatgacaagatggggcatttaaagtagagtgcactgtggtgctttgtgcctcatcgctgtcatgttttcaacaagagatattaaaagaagtaaatgccgggtggtctcatgaggatatggcgatttaagcctttgaaccttgggcatccagtatgacaaaatggctggttgctttgatgttgcaacatgagaaaatctgttcttttattgtttgcaaatgctagaattctttcacattgaaatgatcactttgcatatataccacaagttaaaatttaatatgttttgagaaagatacctctgaacaatatggacatggcaaaaatttgaaaggttctttttgtgtttttccccctaaatcatgaccttggatacactgaatttaaattgtttggttgtaggaaagttattaatagtacacattaatagtaatgtatactcatactttgctcataaagtaccttttaaggtaaatttataagatatatttaccaaatgtatttgtttttaggagtaatgtctcaccaaaggttgtaatttcagttattgaaaatatatttatatgggatatagatggtatttgtactgatgtttgttaagaataaactctataaaatggttcttaaatgattaaaagtatacattgtaaattggtaactggtgacagcgtgaagtaaaaacaaattgtagataatttttgaaggttagtctatgtgaataagtacatagctgctagaagtttatacaaataatgtaaatgcagttttttaagtaaagaactccttttctattagaaaagaagacacgtcaagtgacagataatttgtttcttaaaaaactgtttcctcctaaacaaaagatgggtaaaacatacagcaaagagaactatctcacctgtgttccaaccaatatttggtacatagctaaaagctgatttaattgaattttaaaatgtgagattatgagtgccaccattctgattgggagaaaagcaggaacttgtgttaccaaaacaagtttctctgaaatgtattttacctggatttagaacagatgtttataggacatgtcgatttcttattctctctggaatatgaatgtatgatctaaaaattgacatcatcccttttaacttaatcccctcccgaaggtacccttgctcctgtttatggcagaggtagtttccaagtgattgtctatcctgaaagatttctatgaaattattctggattttgtttcatctacttgcatgtagtatgttctcagaaaggcttttaggtacactaacatttttgttgtttgactttgattttttatgctgaaagttggctgaaatatcatctactaaacatatataatcaattaaaagacataccatgttcccagattgaaagatggtacattaatctattactcaatgcaatctcactaattatccaaatgtgatgttttaatgaaacttaataaactgctagtaaaatttttaaaaatatatgtatataattaaatttgtgttaaatgaaattatatgagtagatatgacatttttaaaagtggctcaaaacttaatatagctccattcattctactcttagcctttaaagttgcattccttaattaaaaagagagcattttaaacatgccaataaaaatattgaccatcttaaaatctttaaatgcctaactactcggcatttattgctgaataactaacattcaagatggtttacatattttaaatagtcacaactcttttcaaatcggtcatgacttaaatgcagctttcatatcagtttctgttttatgttttggtaagcaatttttgctattgataaatatccttaccattttagtctgatttctctctttgactgtcagactccggtggccctgaacaatgtttagattattctccaaaacttttggctaaggagataattttggaagtaagcttaattccttcacgttttgaatttaattagcagagaactgtttttgagtgaaaggcaggtgttttatgattttcatggtgctattccaaatataagtatattaaatatcattatttcaagaaattgtatctcattgctatttgaggacttcacaaattctctttcaggaaaaagtagcatgtccctggtaatggttttatatcatccgttggaaactgcatcatatgttttgtattttaaatccactgcaagaatcgtcgctcctggtaaaaaatcagagtgctctcaggattctaatataatcacatgtttaaactgtgctgcagacttcccaagtgtgactcattggccttttggaagtccaagcctaagcatggaagctactcaacatacgatgaggaaaaaaattatgaacgaacaaattctatgatcatacagatatttagctaaagtacattataaacttacatataacaaaaatttaagaataacccaaatgtttgacaataaagtttctttaagtaaatttcatattgtgcaagtattaatgatgtcgaatatcattttcctaattttgatattcgatatataaaaaaattaaatgtctttgaaaattgcttccaagatagtgcttttggttccatagttgtgtgtcctttgtttgtaaaatgtgacttctccttcaacttttaaattagaacttctcatgatatcctaaatgacatattattgtagagtaagtgctggaagtgctcatgtcttttgcttgtttccttagtgtcattctgtagagctcattgacttgaaggtgacagagacttacttctatagatactatatgtaataccatatgtcaatatctatagattctatatttgataccatacatgagtcaatcaatcagtcaacacatatgtaatcaaagttggcagtgcatttactcctgagttagatgctgtagggccactgttgtgtgtgatcttgccttccagaaacttacaaccaagttgaaaagacaagagccataaaataaaataatagcaaattaatataaaacctggataaagaatgtaataactagatgaccaatttgagagtgcttattgggacttatgaagaaaaagaaattgaaaaaaggtgagcctgtgtttaaaatttagaggggtatagatataacacagactgttaatgttttctttcaatatccattttgttttactattcttttttaaggtgttttattttagttgtttttacacgttacatgaacattcattcatcgtaatgcatattttatcacattttattgattgtccaatattcattttattgtttatccattttattgattgtccagtgctgacatctccctatgtcagcatttaataatttaataatttctgttgaacttttaaagggctttgggtatgtaatttctgttgaactttttaaagggctttgggtatgtaattatttaacaaagtgcaccaactagcagaattatctgtatacatagaagcgattttttttataatgatgatgatttagtcattcaatgattatttattgagtacctgttatgagccatggactgtcttaggtgctggtgatatagaactaaaagaaaaagacaaaactccttatctttgtggagcctacattttaattatgtaagtaggtaataaataatataagtagctaaagtatacagtgtgttgataatgattaataataaagagatgctgggtacagtggctcatgcctgtaatcccagcggtttgggaggctgaggtggatggatcgcttaggccaagggattcaagacctgggcaacatggtgaaaccctgtctgtaccaacaaaaaagtacgaaaattatccaggcacacacctctagtcccagctacttgggtggctgaagtgggaggacccatttgagcccaggaggttaataacaattgtaggtagggtagttggtggtagttggtgagaacttccctgaagagataattcttgagtaacaacttggaagacatgaggctaatatcatctatatctgggggaagaaccttccaggcggggaaactgaaggctgttttcttcactgcaggtggctgccacataaggctagtacttccctttcaaggtagggagtatcgaggaagaggcaaacacttattgctcagagaagaaaaaaggactaattttgctttagcaaacctgttatttttgtactctaaataatattatatctaaccattccaatattttgaaatcaagtattatataattctgatcattaatctttactaaaaactttgtatacatactctgacaaacaatctttcttcctcatgagtttgctgagtattgtggagagtgaagattaacaaaaatcgtgagaaaaaataatgtaatagcaacttagagatagttggagtgaagttaggtacattcttattaggagtaagaacaatcaaatccagcacttgcctcaagactcacatctttctaaaacatgtcacttctggacaagaggtgactaccccaattaagtaatttatttgtgtgggaggatctaactccagaactctgtaagaaaaagaggtgcttttggatgctgataaatcccccaaatgaaaagttatattaaaacatacatcttgatttcctttgaagagtgtatggtgtctgtcccatgactggcaattcttatcatccacttgagaagggataatctcactgtttgtcagttgagatggctgtaaactgaaaattattatgtaagcagcctgacgaaagtaccaagaaaactttaattaacacttgcatgattaagaaatgtaataaatatgatggtagatatgataaatagctttaatctcaatccctattacaatcacaaaatttaacttctcagagaaacaatctgatgactatgtactgacattttgaaattaagtttgaaatgttaatgtttttggttgagtatcactctttctgctgccccagattctagtgttagacatttatatgcttttcacttctcaagccagagaaccataacatgattggcatagatatctattctgttttttagcttctaatatctgaaagtctgaaccaattccaaagtgttgacattatacagtcatttttcatggatgtacatgttatggctggcatgtagtaggaccgagaaaactgtgaaatatataaatatcttcaaactactgttctatttcttatactttttgaaactgatctagtgatttgcttttgatttcctattgcagtgtttgattgtcatctaactgattattttaagtgatttaattatattataagatgaataaaattcaggcttccagttaactaactagcttttgttccctgaagaaattggcagaaaaggacatatctatttatgattttttttcctcaccaatttctactttaagagacatgttctcaagtagagaagattttcccacagacggcattaattggaaacgttgtaatgacaataacaagtatgcagaaatctagttgtttagaagaaattttctctttcttcatgaatatttggacaagctattccgtcaaatgtctgatatatttaaaatgaggccaagaagacatgcagttggttcacagttttccaaagtgtgtgttctagaacacttttatcactagatttctgctgggtttgtgtgacagtgcatcttatctccctcttcattaaataccttatttctcattcattgtttcaaggttttttgcttgtttgttttttgtttttttgttttgtgttgttttgagatggagtcttgctctgtcacccaggctggagtgcaatggcacaatctcggctcactgcaacctccaccttctgggatcaagtgattctcctgtctcagcctaccgagtagttgggattacaggcaccccaccataaccggctaatttttatatttttagtagagatggggttttgccatgttggtcaggttggtctcgaactcctgacctcaggtgatctgcccactttggctgcccaaagtgctgggattacaggcgtgagccaccgcgcccggcctttcaaggttttaatatcttctacagcaaagaaatctgattaaccttgcttaacccaatgtttaccaaatgtatttactgacagaccaattacatatttacatcagaccaattacatttacatcagaccaattaacatattctgagactagcatttcgggaagcaaatgctgctaaaacaccttagcaatttctgtgagaatgaaatccatatccagttaacagcgtttttcagtgttgtataaccttgtggacaatttgatactggtttaggttcttgaattattgaccttttaagaagtctgcaggtgaataataattggccacatacacagcaatgcacttagagcattattttaagttccgcacttggaaatttgccagcactactttggaaatggcaactaaagcaagcatttcatatattggattctatggaactttgctgaatttggagacagaaatgcattaagcagcattcaatataactggtcttaaatgtgggagggcttcgtgtttatttgcaacacataattttttgggagccttaaggctctttagactccaaagtgttttcctcacatcctatcactcaatgaaattccagctttggagctcctccatctttcattggaattagataatcaaaacaaccctgtcattttctatcctatgcctctgcttagcctttttctcttcctaaaatgtccttctcctttatgcctcaatcagtgcccttcataattctgtgctaccttcaaatgacccttcctccctcacacctttcctcattctcaccatggtgacagctgtttgtccaggctgtgctgaggtaatcgaaatgtttcctcttttctctgtgtctaaacgggactttgcttgcctctttgtcataacagattctatgaaatactgttactgggaaacacgtataatattccaccaacgttttcataatcacagacgacgttttgcttatgataactagtgtctttcacggagtagaaatgcaaaatcatacggcatggcaacttaaaaattggccttgaccatttcttttacactaggggagtcacatgaaaatgcaggttgaaaatcacattttgagttttttttttttaatttatttactaagatatactctggctacttcacatgtaaacaaagaatttatttcttgaggatcctggcattattggtacattttcttgttgtcacttggttttggccatttttcaactggtcaaaattaaaaaaaaaaaaaatttcaaagcaatatgacacctacaattacattgttaattttggctctccttattctttccagataattgttcttcatccattttattcctaagttagaattctttaaaataaacttttaaataatttcagacttatgaaaaagtttcaaaagtagtacagaaatttccttacagtttttaagcagcttccttaaaggttaacatcttacataatcagggaacagatattgaaaacaaaagattaacattgaaaccatcctattaactcatctgtagacctacttaagtttccttagttgtctccctgaggacttatttcctcagtctaggatccaatccctgatccaacattgcaggtagctgtcaggcactttgcctccaatctgatatttcttcaatctttctttgtgcgtcgagaatttgatatttatcaagagcgttatccagttattttgtagaacatcaatttcaggttgtctgctatgtaagtagccattatatcctttgaaaaatagtcttaggcatatttctgaagattacttgtgtggaaagcatttgtttcccaaatgctttgttgacttgcatcattactttccatgtgaaaaaatgcatgttttagcgtctaaaaaaaaaaaaaggcagaaatatcttattttcccctttcctgatgatttgtcctataatagtctttggaaagatttataatgagattgagtttcagagctttgtaagcctctgttcacgagtatacatcctttatcaaaaaatatttttaaaatgtgaagttatttatattagcattctccagagaaacaaaatcaataaggtatatatgtagatagatatatgagaggtaatttgttaggggaattggctcatgtgattatggaggctgagaagtcccatcacaggccacctgcaagctggagatcctgggatgcctgtagcgtgactcagtgcaagtcttcaatcctcagaatcagcgaagtcgagggtggaactctcagtctgaggctgaagtcctgaaaacctgaggagcctctgatgcaaataccagggtccaaatgctggagagcctggaatttttggtgtcggagtgttataggaaaggggtcctgatccagaccccaaaagagggttcttggatcttgtgcaagaaaaaattcagggtgagtccacagtgcaaagctttcaagtttattaatagtaaagtggtgaaagtacagctactccatagatagagtagggtgttcctgaaagtaagaggagaaatgcatccacactagatacaatacttgtttatgtatagtataaaaaaaaatcatggggacctgtgctctgctactagggtttgtgataaaggattaattttcttaattagtatattttgcaagaatcagtattatgatctttaaagcaaaattaggaatgcttcttttctcaagataacaggatatcaggacactcctaagtctgggtctgtttagtaaacattatcaatctgttcccttgcccgtaaacatctagaggctaggaatacctaacttcctgggaatgcagcccaacaagtcccagcctcatttccctagccctcactcatgatggagtcactctggtttgaaagcctctgacaccaggtcaggagaagaggggtgtcctatctccaggagagagagggaatgagaatttacctttcctctgccttttccacctatattgagggtggatcttctccacccactccaccgactcacacagtaatcttctctggaaacatcctactagacacacccagaactaatgctttactagctctccaggtagtctttaatccaataaagttgacacctaaaattaatcatcacagtctttttttttttttaaaccacacaagttatccattttctttcttagtgactactaggtaggagtattagacaacttgaaatgttgaaatttaattgtttcaagttatccattaattatcctggttagaaaatcaggcttgattggtgtacctctttaatgaatagcgcagagaaatcacattaaaatgtgatactgttaaaccaatgtgttaattctttgacacacttgctttccttctttcattttccagtgtgcctctctctcaaagtttccagactctgctttttcactaacttccttattcattttgaccaattcctgccttgactaatttaccctaatcaatttgcaatctgatttctttccctaccacttcatgagactgctttgctccctcaagaagtgcaaatgactttctaagctaaatctgctacttgcgtgcatcattgacaatgctggccactttctttttcagtgaaattcttaccctcttgtaacatctgacaaacattatctcttggttcccttgctgcttctccaaacatatcttctattctcatttttgctgcttgtcttttcaaatataggcattccacaggtttattctccaaccatgccgtgtttagagaatgctcaaatgctcccaaaacttcagttatcaccttcgtgcaactgactcaatctttaccttgaatttgcatattcatcctgaactttttgttctgaatttcccataggtactacagattcaactaggcactaaactgagattattagttccccttataaacatcaatttatttctcctactctcactccctgatttgggctgaagttaaattcagtgtttaggttctcccatcccacttgtcctctgcctcctaaaccatattattcttttaatctggactattctctccctctgtcactttatgtttgaacatgataatttttcatttaggtacagcttgagttctatctcagtgatacctaccctattcaattcagaaagaatgaaagaactctcatgtaattaacttcattgcatcgtgtttcatcattagttgtagacatgtctgtattgttttcctcatcagaatgtaagtctctcaagcgatctttgtggaacttgtaagtcggtcattaccttctttctttctttctttttttttttttttttgagacagagtctcgccccgtcgcccaagctggagtgcagtggtgcaatctccactcactgcaagctccgcctcccaggttcacaccattctcctgcctcagcctcctgagtagctgggactacaggcgcccgccaccatgcccggctaattttttgtatttttagtagaggtggggtttcaccttgttagccaggatggtctcgatctcctgacctcgtgatccggccgcctcagcctcccaaagtgctgggattacaggcatgagccaccacacccggccgctcattaccttatttctataatgatttgtgaattggcctgaaataactcatccctgctttgttgttgttgtgttgtgttttgtgattcagccctgtaaacggcatgctcctcccaggaatgataatgctacactgtaacacagatcattggtgtttcaaaaaacccatccatccatgtcttcatttatttgcaaaacaagggcaggaaaaactagaattaaatcgttaattctctctcggtctctcagggcaatatgttgggcagttacttgagtgagatattttttatcaaaccaaatatgctgaggcaggaataacatcaaaggtgtttgtgatgtactgttgctctcattagttacctgcagatcaaacaggtatctgttctaacacttcgattttgaaacttaatgctgtgtttgttaaatttacttaattaggacctcttaacacctcagatagtcgcttaaaacaacaacaacaaaaacaacagtaatacccagctgttagccctgcggatgaaacaataaatgcaaagttaacactttttaaaggtgaatatgtacattttgatgcctcgacagcattcagtaaaaatcaagtgtgcttagagataatctactaagttgctgattgtttctggacctgtaactcttaataaatattgcaaatatctaaaagatatggatcattatttaggggaaatgtatgtgtatgcataaatgcaatcttttataatctaaaaatacttttcaggagctctttctgagatgaagagaattctcaatgtcaagatttgaacaagaagagaatggaatacacaatatggtaagtgacttgcaaaaaagatcaatgtgaccacatttctagtgctccattgggcagttatcacttgtaagttgcatgcatagaaaaatgcatacttatggtagtcactgttgcaagcagttctgaaatattaacacagttgatcaaaattgttccactcctaaaagcttattttgataaacttggtgtaaaagatacttggctatcactcatggcaggtgattttactctaatttttaattagggaaaattaaggttgcttatgtgattaatgtcacgcacgtccatgtgaagagaccaccaaacaggctttgtgtgagcaataaagctttttaatcacctgggtgcaggtgggctgagtctgaaaagagagtgagcaaagtgtggtgggattatcgttagttcttataggtttgggataggcggtggagttaggagcagggggtagatctcacaaagtacattctcaagggcagggagagtattacaaagtaccttttcaagggtgggggaatatcacaaagtaccttctcaagggtgggggaatatcacaaagtaacttctcaagggtgggagaatatcacaaagtaccttctcaagggtggggaaatatcacaaagtaccttctcaagggtaggggaatatctcaaagtacattatcgcaagggcggggagggtgtattgtcataaggtcaattgatcagttagggtgcggcaggaacaggtcacaatggtggaatgtcgtcagctaaggcaggacctggctatttgcacttcttttgtggatcttcagttgcttcaggccatctggatgtatacatgcaggtcacaggggatatgatggcttagcttgagctcagaggcctgacattcctgtcttcttctgttaataagaaaaacaaaacaaaatggtggtgaagtgttggggtggcaaaaatttttgcgggtggtatggagagataatgggcgatgtttctcagggctgctttgagcaggattaggggcagtgtgggaacctagagtgggagtgattaaactgaagaaagattttggggtaaggggtgatattgtggggttgttagaagcagcatttgtcatatagagtgattagtgatagtctggatgcagttttgtaggaattgagagattaattggaagacacaagggccaagtaagagaaagagaaaaacaggtatcaaaggactaagaattgggaggacccaggacattcaactagagagtgcccaagggggttcagcctaattatttgcttgtttgatgagtttttgggctctatccttgcatttttttatgttgtcatataccaggccagactgatttaggtaaaaacaacactcttcatttaaaaatacacagagtcttcctttttcagcagtgagtaagtcaaggcctgttcctgttttcttatattaataataataataaaaaaacaaaatagaagtaaagtgttagtgtcatgaggggaacaggaagctgttcggtcctatttgcaaattgattttgggggtaaggctaactagtgtacatgtgcctgtctaattaataggtagacacatgtaggtgaaggagccacagaggaggaagacatcttttttattattattattattattattattatactttaagttttagggtacatgtgcacaatgtgcaggttagttacatatgtatacgtgtgccatgctgctgtgctgcacccattaactcgtcatttagctttaggtatatctcctaatgctatccctcccccttccccccaccccacaacagtcaccagagtgtgacgttccccttcctgtgtccatgggttctcattgttcaaatctcacctatgagtgagaacatgcggtgtttggatttttgtccttgcgatagtttactgagaatgatgatttccaatttcatccatgtccctataaaggacacgaacttctcattttttatggctgcatagtattccatggtgtatatgtgccacgttttcttaatccagtctatcattgttggtcgtttggattggttccaagtctttgctattgtgaatagtgcaataaacatacgtgtgcacgtgactttatagcagcatgatttatagtcctttgggtatatacccagtaatgggatggctgggtcaaatggtattcctagttctagatccctgaggaatcgccacactgacttccacaatggttgaactagtttacagtcccaccaacagtgtaaaagtgttcctatttctccacaacctctccagcacctgttgtttcccgactttttaatgattgccattctaactggtgtgagatggtatctcattgtggttttgatttgcatttctctgatggccagtgatggtgagcatttcttcatgtgttttttggctgcataaatgtcttcgtttgagaagtgtctgttcatgtccaagaagagaactttgtaaggcaaaactggaaatgtaaagtgaaaagacaagagggagcaccaaaacaggtgtcttgcacccagactcttagggatttagtaagggcagcagccgttagaggttgtaatggggattgatggagcaactgggtagaaggggaggtttgatttttatggtgtatgagaaagtacaaagtgtctacgagtaaccgttcactgctattcatggggctgggtataagcaagcaagaggaggggctaagaggagagtccaaagaacaaggggaaggtagctaaggatggagtgaaatgcagggcaaatgtcttaaaggaaatgagaggttctaagaggcgggctagtggcttgtaacttacatggaagaggttatgaaaagacgaaagaatggactgagcttgtgaggcaggaaggatgagttttccatgatctaagaaccacttgccctgagttggaaaagactggtagagcaggttttcagaagaagagtaggtgggagtgatagaggagaaaaaaaaatactggccctccggagtgggggctggaatattagcgggtgtggaggcattggttattttttttttgcaataagatcagtaggtttctggtgtcctttacaatgaatgattccagccttggctggcaggagaacaaccttaagggcctctattagggaggcattattagtggaagagctttgtgtggtaaggaagcctcttttgacccagatggcagcatggttatggaggatgtggaaagcatatatggagtcagtataaatgttaatgtgcattcctttagctagagagagcacacgagttaaagcaatcagtttggcttgttgggaagtggtggagggaggaagtgcagcagcttcaataatagaggtgtgggacatgacagcatatccagctttagctggtgaaaattgattgggtttagaagaaccgccatcaataaaccaagtgtggtccgggtttggaatgggaagattagaaatatgaggaaagggagaagatcctatgtgtgttagggaaatacagtcatgtggttcaggacttgtgttgggtgctaaatgagaagctgggttgaaatcaggcccatgggtaatagttactattggagtttcaacaaagagtgaatagagctggaggagttggggggcagacaataaatgtgaaaggtatgaggaggatattaatgcttgaaggttgtgagagctgtaaagggtaagtggagcatagcctgtgatttttgatggcctctagaagtatttaaatggcacaaacatgagggccagcccagaattgtgaagttgagttgtttggatagaaaggctatagggcacggtcccagctcttgtgtaagaattccgactgcacagtcctgtactttggttgtgtgtaatgaaaagggttgggatgagttagggagagctagtgtgggagcagcttctagggctgtttttaaggaatggaaagaggagtggggaaaggatctaggatctatggggccaggtaggtttccttttgtgagtttatgtaatggtttagtcaggatggcaaaatcaggtatccaaaggtgaaagtacttaaccatgcctaggaaggaaaggagctgtggctttgtagaaggggttggggtttgggagattagctggacatgatcagcagggaaaacacgtgtgtttttatgaagaatcatgccgagataggtaaccgatgaggaagaaatttgtgctttggaggggaatatgtgatatccctttgagaatagatgttagaggaacaggagggtgtcctgttgagaagattttggtgggggggggcagctataaagtagaaggtcgtgaaaatattgaataaggtgagaagcagatggacagaatgaaagtaaatcatgagaaagggcttgactgaagtaacgggggctgtctgtgaagccttgcggcagtacagcccaggtaatttgctgagcctgatgggtgtcaggatcagtccaagtgaaagcgaagagaggctgggatgaaggatggaaaagaatagtaaaggaagcatatttgagaaccagaacagaatgatgggttgtgaagggaggttattgaggtgtggctgtagcccaggaatagtcagggaagcaaataatttggctaaaatgtctcgacctaataaggaagctgggcaggtgggaatatctgaaaaggagtgcttaaaagagtattgtccaagttggcaccagagttggggagttttaagaggtttagaagcctggctgtcaatacccacaacagttacggaggcaagggaaaaggcccttgaaaagaaggtaatgtggagtgggtagcctccgtattgattaagaaagggacagacttaccctccactgtaagagttacccaaagcatctgtgatggtccaggaggcttccgaggcgatcgggcagcatcagtcttcagctgctgaaccaagaagatctgggaaggagtcagagagccttgggccagagttccaggggctctgggagtggctgctgggatagttggacagtccaatttccagtggggtcccgcagagatgggacgcagcttaggaggaatcccaggctgctggcattccttggcccagtggtcagatttccgtcacgtggagcaacatcctgggggaggaggtcctgaaggaacgcctgtcctctgcggtttaggcaatttgaaggtcttgtgtgctggggatacggctagggtttctctcacggcagaggcaagtaatcgcaactcagaaatatgttgccacttggctgactcttttttattattgtacaccttgaaggcgaggttaattaagtcctattgtggggtttgagggctggaatctaatttttggagctttttctagtatcaggagcagattgggtaataaaacgcatattgagaataagatggctttctggcccctctgggtctagggcggtaaagcatctaagggttgttgccaaacgggccatgaactgggctgggtttttatatttgatggaaaagagcctaaacactaactgatttgggaaaggtctgatagagaaaaaggagcattaaccttgactatgcctttagctccagccacctctttaagaggaaattgttgggcaggtaggggagggctcgtcatggaatgaaactgtaagccagactgggtgtggcaggggaggtgatagaggggttgtagggtaggggagcggaagctcaagaaaagctggagcctgattcagcctggcagggagcgacctgaggaggagcagtgtgggaagaaggggagaggtcagatgggtgggtagaaaaggaagattcaaaagacttagtgacgcttggggttgggactgaaggaacagacagaagagaaagaagaaagatgtgggacaagtcgcactgggagcagagactagggagggaccgatgtgtgaaagaatgccgggatgtcagtcacctcagaccatttgcccatttttcgacaaaattatctagatcttgtaggatggagaaatcaaaagtgtcattttctggccatttagaaccattctcgggttttggcaccaaatgtcgcgcacatccatgtgaagagaccaccaaacaggctttgtgtgagcaataaagctttttaatcacctgggtgcaggcgggctgagtccgaaaagagagtcagcaaagggtggtgggattatcattagttcttacaggtttgggataggcggtggagttaggagcaatttgttgtgggcagggggtggatctcacaaagtaccttcttaagggcgggggaatatcacaagtaccttcttaagggcgggggaatatcacaaagtaccttcttaagggcgggggaatatcacaaagtaccttcttaagggcgggggaatatcacaaagtaccttcttaagggcgggggaatatcacaaagtaccttcttaagggcgggggaatatcacaaagtaccttcttaagggcgggggaatatcacaaagtaccttcttaagggcgggggaatatcacaaagtaccttcttaagggcgggggaatatcacaaagtaccttcttaggggcgggggaatatcacacagtaccttcttaagggcgggggaatatcacaaagtaccttcttaagggcaggggaatatcacaaagtacattatcacaagggcagggagggtgtattgtcataggtcaattgatcagttagggtggggcaggaacaggtcacagtggtggaatgtcatcagctaaggcagcacctggctattttcacttcttttgtggatcttcagctgcttcaggccatctggatgtatacgtgcaggtcacaggggatatgatggcttagcttgggctcagaggcctgacaattagaacatacatatttgtgatcctacaaccatggagtttcttaagatgacatttaggattataatactggttttaatagcaagccaggaatttacagtgtcttaaaatgtggcttatttcttattcagactattcaacacacatatgcgacagttaaataaatatatcctgatatttacagggctttttatttgtttacaaaagtaagttagttttatgtagtttgtaagaatctttaacgtgttattttcttttcttgctgtgtttactacagtgagtatattaagaatgtatttattaggtaagtctcttttttacttcttgtgctattcagggtctcccagacaatgagtagtaagacagttgagagagtaaagaaaaaataagagcagagagttccagagtcatttgtggtgtgtgaatatagacacgttgctagctgtgtactctacccctcccactaccatcccaccccatcaagggcccaggaaaatgctgcatgtttacagtgtcatccaggcacaaactacctttttctgtagtagtcaaatttcaaaagacatttgtaggtcctactttatttagttagaaacattcttctatactagaagcccttaaatttggatcaaagagtaagttttatacaaaataataagtaatcactccgaaattatatgcgatacattgtgtttatatttttttttcctgtggagaccatcagttggtttttattaattgttcagcgatagtgatgacagaaaaagttgtctaaaatggttttacaaatttagaatagatgtgattaaaatgaagattttgaaagaattgtggagtttgtttgtattttattatcatgaattctccagattgtgttgactgtaaaatttgtacacttatgactcattttaatgattttttttagagaaataaaaacatttcaaaagagtttagttcctactttcccttttgtcattctctgaaacctaaaacaaatttgcatagttattcttgcaaataaaaaaaacataaaattttattcatgtttgttctgtagtcattttacaaattcctaaaataggctcttagttaacctgtggctaaatgtatattttttaaagatatctattattttacaaatattcccatgatattggctttgttatctgaatattgatctctattatctccagattattttgttttttgttttttgttttttttgcttgctttctgtcacaattataaatagaaaaaccagttctgacccaaacataatttttctttacttacctggaaattctggaaattatttgttttgtctcctacatagtatctctctccctgctaatgccaatgtatggcctcctacctctgtttatactcatgaagatacttattctttagtattacagcagcatattttatcttcatcaaactctattaacaaagattctccagcccatgtctacactaactgatcaccagttttattctctttcattagatatgctaattataaagaaatactctagatattttgacgatttctttggtgggggaaaagaggagtgtaaggatatagaagaaaataaactcagattctcctgctatactctcacaacacagaacatgtctgtgaccaaatgtgtgtggatttttttccccacacacactaagcaattctccagcaattaattctgcagtggacaccagctgggtgtcctctaattctattcagttctgactctcaacctcaagatagtttctgagcccacaagttgagggcccagtcctcttactgaccccacacactacttcagataccagtcacaagtagtagagcccatacttctgaccaactgtctgtaaatcagggttcccacgatcttctctctctttttttttttttttttgagatggagtcttgctctttcacccaggctggagtgcagtggtgcgatctcggctcactgctacctctgccttcctgtttcaagtgattcttctgcctcagcctcccaagtaactgggattacaggggtctgccaccacgcctggctaatttttttaatttttagtagagacaggatttcaccatgttggccaggctggtcgcgaactcctgacctcgtgatctgcccacctaggcctcccaaagtgctgagattacaggcatgagccaccatgcccagtcattgtttttttgtttttgtttttttttgagatggagtttcgctcttgtcacttagggtggagtacaattcgcaatctcggctcactgcaaccactgactcccaggttcaagcgattctcctgcctcagcctcccgagtagccggggctacaggcgtacaccaccactcccacctaatttttgtatttttagtagagagatgggatttcaacatgttggcctggctgatctcaaactcctgacctcaggtgatccgcctgcctcggcctcccaaagttccgagattacaggcgtgcaccaccgcgcctggctgatcttctctttgagtttgattaatttgctagagtagctcacagaagtcaaggaaacacttatgtttactggtttattataaagcatattacaaaggatacatatcagtgatcagacaaatggaagagatgcagagggcaaggcattcaagaacaggtgcaggctgggtgtggccacacctgtaatcccagctacttgggaggctgaggcacaaaaattgcttgaacctgggagtcagaggtttcagtgagccaagatcatgctactgcactccagctcggaataagactgtatctcaaaacaaaacaaaacaacaacaacaacaaaaaatacaggtgcagagcttccatgccctctttaggtgtgtcaccccacagggaacctccacttgttcagctatctggaagctctgaacccagtccttttagattttcatgtttcatggaagcctcattatatagtcacgattgattgaattatctgccattagtgatcaacttaacctccagcctttattctatcccccaaagctggaggggcaggcaaaaagtccaaaccctctaatcatgccttggtttttcctgtgaccagccctgtggtcatcttatttgcatcctagatactcttatgactctagagattccagaagttataagagctatatatcaggaaacaaggatgaagaacaaatatatatacaagtgaccatgcaaaaatgcaggggttaggggtggcacagtaaaaaatccacttagaaattttgagtccccaaaagcttaattaatagcctactgttgactggaagccttactgataacataagcagtcaattaacacgtattttattttatatgcattgtgtattgtattttcacaataaagttagctagagagaaaaatgttaggaaaactataaagaaaaaatatatctactatttattaagtggaagaggatcatcataaagctcttcatcgtcctcatcttcacattgagtaggctgaggtgggggaggaagaaaagggggtggtcctgctgtctcagttgacagaggtggaggaggtggggaaggtagaaagagaggcaagagaggcagatacacttgggttatgaaaagacatcctaactgatgtctaattgctttttaatttctctaaaaatgtttctgtatggcaacaactcttccaccattttctttaatttttccgcccctatcacaaaacagtttatgtcataaaataagtcaaaatgggtctagaataaccgaaatccccctgccaaattgtctactgtcagtttgttttctggcattacttcttctacatcttcttcctcatcacctggtactggtttggaaccacttacctccatcaaatctccttccattaattcctcctgtgtgctgtctattaactccaagattctccaagattcatatcttgaacccccctccaacacatcatttttgccatatccgctatctctttcatgatttgtttgattgtctctgttgtaagtccttaaggtcatgcacaacatctggacacaatttttccagtaggaatttattgttttaggcttgatggctttcacagctttttctgtagcaacagtggcatcttcaatggtgtaattcttccagactttcatgatgttctactggggttctcttccatagcactgacaatcctttccataaattaccatgcataatgagctttaaagattcttatgactcccttgtctagaggatgaattagagatgttatgtttgggggcaggtaggccacttctacaccatcagtgttgaactcatggggttctgggtggctggtgtcattgcccagtatcatgagaactttaaaggcactttactggcaaagtactttctgattcagggtcaaagcattgatggaaccaatccagaaagagtgaaagagttcttgttgtccaggcattcttgttgtacaaccaaaagactggcagctggtgtttatcttttaccctcaaggcttgggagttagcagctttatggacaagggcagtcctaatcataagccagactgcatttgcacaaaacagtagagttagcctatgccttcctgccttaaattgtggtgcttgcttgcttctcttccttactgaaaaaaaaatgtccattgtgactttttgggcacttttgtctgcattaaaaaccagttcaggcagaaaacctttctcctcaatgattttcttaatggtgtctgggagctcatttgctacttcttggtcagcagaagctgcttcttcttctgttattttattttatttttttattttttgagacgaagtctgtcgcctgggctggggtgcagtggcatgatcttggctcactgcaacctctgcctcccaggttcaagcgattctcctgcctcagcctcctgagtagctgggactacaggcatataccaccacgcctggctctatttttagtagagatggggtttcaccatgttggccaggctggtcttgacctcctgacctcaggtgatctgcccgcctcggcgtcccaaagtgctgggattacaggcatgagccacggcacccagccttcttctgttatcttgacaatttcaagcaacacctcattctgaaattatcaagccatcctttgctggcattaaattttctagttttacctccttcaccttccttttgctttaagttgccaaataataatttcactctttctcaaatcatattagtgtctatacatatgtctttctcacattgatcttaaaaccacataaaaggtgcacgttctatacaatataaaaaagtattttgcagaaagtactggtgtaattgcagctatagcttaatgaatttttctttttttgcaatggttgttaagctggattcatttctcttgaaacgctgggcaactgcaactgcagacctcaatctatgatatgtatcaaacaattcaactttttcttgtaatgtggtgacttctctctgtttcttgggagcactttcagtaacactaatagcacttcatatgggcccatgctgttattcaaggtttacaatattgcgctaacatgaaaaatacatgaaaactacaagagatatgtttactatgtaacatattttactggagaaagaactgatcacttgaagatgattagcttcacatggtgctttaaatgcatacttgatcctttcaacatgaattggcaacaaaagatggctataaaattattaaaatagtacagcttatatgacttaattttatgcagttatataatacagcatctttatgtttggttacatttctctggactgcaaatatctttgtaagtgtttgtgtttgtacagtttggtaaattttaacttttaattgtagatttgtatctattttatagtaataaatgataaaatagagcagtatttacatatattttatgcattttcatgacatatctaaccttttctgaattttttcaaaatttctgtgctacactgtgagttttttcaaattgtcacaaatttcacaaaaaaattcaaatgtatctattgaaaaaaatctgcataacagtgagccttcacagttcaaggctgtgttattcaagggttagttgtatatgttattaaaattcacaatctcacaaggagcttatgctgctttctgacagcccaagaatgcttcccatgctagctcatgtctttatttgatagtaaatatgttccccacctaaaagatgtctgaagcccattagctttactcatggtgccagaagtagtgtaatattttttcttctcttagtgaatttcttttccagaaaaaagagttgaaacttaataagatcaatatagaaggccaaaagttgtcctgagcaatggggttatttcttaaccagatgcttgtctcttctccccagctgcaacattcctctgtactgaatttctttagtgccaagggggataagtggaaagagatgaaaatatagctgctgttgcatggatgaccccattcactctgactccttcagcaagtttcatttttccttataattctcggaggaatgctttgcctaaccacctaccccaacatctaggatttacttttaagatggtcagttaatattgcttgaacataaacttttggccagagtaactggaaatttaagtttattaaacttttacatacttaactatggtctacagggtattttaaactctgccatttgggtttagatctgcttttttacccccacccccaaatgtgcagcagtgtgaaatgtatgagaactaattggataaagtaatttttttaagaccttggtatcttatttctgccagataatagagaacaaatataaaatattcccatgattaaacacaccagatacagcttgaatttttagaatattaaacaggagtgataatgaggaagaacttaggtccctaattacaaaaggtttacacacacacagacacacacacacatcatattaagaatgtaagtaaatcaagttacaacacaatatatgcagtaagatttcctttcttataaagccaactatatcaagcaaattaaagtcacatatatggaatataatttaatctgttttacaagtgagggctgggggtggtggctcaagcctgtaatcctagctctttgggaggctgagacagaaggatagcttgagcccaggagtctgagaccagcctgagaaatatagtgagaccattgtcttcacaaaataaataaataaataaataaatttctaaaaattaaaaatagggtaggtacggtgggccacgcctgtaaacctagcactttgtgggggccaagatgtgcagatcacttgaggtcaggagttcaagaccagcctggccaacatggtggaacgctgtctctaattacttgaacccaggaggtggaggttgcagttagccaagatcgcaccacttcactccagcctggtcgacagggcaagacccctgtctcaaaaataaattaatattacaaaaaaggtacaagtgattatgtatttttcatacaatgcatatttcctgaaaacacattcagtttagtagttacattaggggaacagaatactatcattatggaaaggaaggcatctttattttatgctttgtatgcttctgtatgactagattttttaaacctcatgaaggtattacctttccaaacagtctgctatgatatttattgaacaagtattcaaatgtttcctttgcatagtttactacttggtggtattctgcttagcaatgtctattggaaggtcccagtatatccaatataaataaatgaaataacattgtactatattattagactgtattattggattacataaaagtttttttctgataagaatgtctgttatatttttctcttcttatttcacagtgattaggctgactgactttctctttcacttgctgttaggatttctggggacattacttcccatctcccttatctagtcagttcagttcaccattttgcaaccaggactatcattcacaagcctggcaaagcctgactgtgaagtctgtacctctactctcgcctactccttagatgaaatgacctggaagtaacactacttcttattgatcctcctggctatcatatcccgttcaccttcttccaggtttatccaagataccctaataatgtttcctatgcaaggtaatcttttaacacaagtctaactcccactttctgatttcacaccttctactgagactgagcttctgatagtatcaatactcatatataagttattttaacatgcatacatatatattcttggaggagtagacagtacacattttttatagactcatgcagtggggtttaaatacaatttagctattatgtaatttttggcaagtttcttagcttctctaaatcttagtttccaaatatgttaaaagaaagtatataaaaattaccaacttacaatttcattttgaggatgaaatgaattattgtacccaaagtacttaaagcagcacctagcacagaaaaatatgaaataaagatagaccattttgattatttcatagaaagaaatgtcatggtattacttattattaatgaatatgttgaaggaataattagtaaaaatgaatatatgatatatattgcagtgctttgcattgatggcctgatgcaaatagcagtaattacttacacaggatggctaacatttctgggaaagacattctaatcaatagttgctatctgtggtaggttaagtgtttgaattaaaaaaaaaaaagcagtaattcattgtgatacttccaaatgcactgttcacattttaagttggagacagattattacaagaaataggaaagataatcctaaatcttagtcaattttttttctcattacagattttaaaaagtgactagtaagggagaattttgagagtctagaaaacctggagggaaagaaaaaagagggaaggaaggagagaaaaaaggaaggaaagaaggaagaaaggaaaaaaaggaggaagggagggaggagataaaggaaagaaaaggaaaagaaaaaaggcagaaagaaaagagaaagaaagaaaaagaaatagaaagaaagaaggaaagagaatggaagaaaaagaaaagaaaagaaaagaaagaaaggtagaaaagaaagaagtaatggaagaaatttgagtattaacagagggcactcaggtttccaattcaatacatctcctatgcatattctacaaattagattgtcaaatattcagcttctctcagaaatttaggctattagccatttacaacttactttgaattaatttaatcagattatcagattaggattttgcttagtgactgccaaaatcagccaccctgaggaaattggagttttgattgaaaagtggaactgacaggaagtttggtttgaaagcacagggctcttgctggaggaggagggattgtgggtgttcagtgagttagaagagcctgagatagccagagggaagcatgagggtactggatgcctgggcaaagattaagagaatttgccaagaggtgggacatttccaagacaaacagcatactttacactttggctaaagtccctcatggcagtactcatttttgatatgtgctctcactacatttaatcgcagtgacagttgtgagattagaggtaccgctttcttcaaaaggatcattgaaagttgtgggtttatccttgtgtttctgtttagttttttatcatactagttttatttgtaaaccaaaatgcattatattttagacctttgctccaaaaggctaatgtaataatttttttaatggacttaagattttaactctaaaacctcatcaacattccatatattatgattcacatgggacttgtaaaagacagactccacacttcagaactgcaatgggctttttgttcccactgctgagtatttccgacttcttttgaaggttataaatttacaacttagtatgttttatggtgtggtgaatattgcggagaatgatctggccagatgaaaatgggattctgttggccctcaatgttcttttcttgagagacctactctgcattttaatacatgttatactatcttcaagttttaaccaaaatgttaatttgattttttttttctttcagtcaggaactttttgatgacatatttgtattccacatttcttcacttgtcccagtgttttattgggaaagtgttgaggtgtcttgggatctcttctgactcgttaagcatggagaatgattggttgttaaacgcagtaggggaatattagtaggaaaaaactgttttggttttatgaatggagatgggtgcctgtcgacatttagaaataaggttggagcactatactggtgtatgtgctgaagatttggaggtcatcaaacaacctatatgtaagagtcaatgagatttaaaagaattgaaaagaaaatcagatataagagaagaacaaaacaggagaaacaatgtcatggaaactaagggagtagttttactactttaatgtatatttctcagaaattgctttttggacattacttccatacttgagaaaatatttctgtaacatacctattcaagtgtttagattaattatttttttctgattaaaacattttgctcatgtatcttttaatttttaattttagtacaattgtatatttacaaaattattgaaaagataatacagagagctccccacactcagtttctcaaatctatcatattagtatgatatatttatcacaattaatgaaacataattgatacctggtaacacaccaaagtctatatgttatttaaatctcctcagtgtttccccaacaccctctttctattccatgatgatgtgcaggggtaccacattccatttagtagtcgtatcaccttagtctattcttggttgtgacagtttctcagacatttcttgcttctaatgacctttataattttgtggcttacgggtcacttgttctgtgtaacattcctcaattggaatttatctgatatttatctcaggcttagactggagtcatgcattttaagaggaggaccacaaagataaattgccattctcatcacctgttatcaaagatgaatactatcaaaataacttatcattattgatgttgacattgatcagctagcttgtggaagtgttaatcagatttccccactgtaaagccaattattttctttctgtctctttcaacatcgtgcttttatatatatgtgtgtatatatatatatatatatatatatatatacacacacacatatatatatatacacacatatatatatatatacacacacacacactatatatgtatttttattacactttaagttctagggtacatgtgcacaatgtgcaggtttgttacatacgtatacatgtgccatgtatacatatgtatacatgagccacgtatacatgtatacatgatacatgtatacatgagccatgttggtgtgctgcacccattaactcgtcatttacattaggtatttctcctaatgctatccctcccccctccccccaccccacaacaggccccggtgtgtaatgtcccccttcctgtgtccaagtgttctcattgttcaattcccacctattagtgagaacatgtagtgtttggttttctgtccttggaatagtttgctgagaatgatggtttccagcttcatccatgtccctacaaaggacatgaactcatccttttttatggctgcataatattccatggtgtatatgtgccacattttcttaatccagtctatcattgttggacatttgggttggttccaagtctttgctattgtgagtagtgccacaataaacatactgtgtgcatgtgtctttatagcagcatgatttataatcctttgggtatatacccagtaatgggatggctgggtcaaatggtatttctagttctagatccctgaggaatcgccacactgtcttccacaatggttgaactagtttacagtcccaccaacagtgtaaaggtgttcctatttctccacaacctctccagcacctgttgtttcctgactttttaatgatcgccattctaactggtgtgagatgatatctcattgtgattttgatttgcatttctctgattgccagtgatgacgagcattttttcatgtgtctgttggctgcataaatgtcttcttttgagaagtgtctgttcatatcctttgcccactttttgatggggttgtttgtttttttcttgtaaatttgtttgagttcattgtagattctggatattagccctttgtcagatgaataaattgcaaaaactttctcccattctgtaggttgcctctttactctgatggtagtttcttttgctgtgcagaagctcttgagtttaattagatcccatttgtcaattttggcttttgttgcttttgttgttttagacatgaagtccttgaccatgcctatgtcttgaatggtattgcctaggttatcttctagggtttttacggttttaggtctaacctttaagtctttaatccatcttgaattaatttttgtataaggtgtaaggaagggatacagtttcagctttctacgtatggctagccagttttcccagcaccattaaatagggaatcctttccccatttcttgtttttgtcaggtttgtcaaagatcagatagtttagatgtgtggtattatttctgaggcctctgttctgttccattggtctatatctctgttttggtaccagtaccatgctgttttggttactgtagccttgtagtatagtttgaagtcaggtagcgtgatgcctccagctttgttcttttggcttaggattgacttggcaatgcgggctctttcttggttccatatgaactttaaagtagttttttccaattctgtgaagaaagtcattggtagcttgatggggatggcattgaatccataaattaccttgggcagtatggccattttcacgatactgattcttcctatccatgagcatggaattttcttccctttgtttgtgtcctcttttatttcattgagcagtgttttgtaattccccttgaagaggtccttcacatccctggtaagttggattcctaggtattttattctctttgaaacaattgtgaatgggagttcactcatgatttggctctctgtttgtctgttattgatgtgtaagaatgtttgtgatttttgcacattgattttgtatcctgagactttgctgaagttgcttatcagcttaaggagattttgagctgagacgatggggttttctagatatacaatcatgtcatctgcaaacagggacaatttgacttcctcttttcctaattgaataccctttatttctttctcctgcctgaatgcctggccagaacttccaacactatgttgaataggagtggtgagagatggcatccctgtattgtgccagttttcaaagggaatgcttccagtttttgcccattcagtatgatattagctgtgggtttgtcataaatagctcttattagtttgagatacgtcccatcaatacctaatttattgagagttttttagcatgaagggctgttgaattttgtcagaggccttttctgcatctattgagataatcatgtggtttttgtctttggttctgtttatattctggattacatttattgatttgcgtatgttgaaccagccttccatcccagggatgaagcccacttgatcatggtggataagctttttgatgtgctgctggatcccgtttgccagtatttattgaggatttttgcatcggtgttcatcagagatattggtcgaaaattctctttttttgttgtgtctctgccaggctttggtatcaggatgatgctggcctcataaaatgagttagggaggattccctctttttctattgattggaatagtttcagaaggaacagtacaaactccttcttgtacctctggtataatttggctgtgaatctgtctggtcctggactttttttggttggtaggctattaattattgcctcaagttcagagcctgttattggtctactcagagattcaacttcttccttatttagtcttgggagggtgtatgtgtccaggaatttatcaatttcttctagattttctagtttatttgcatagagttgtttatagtcttttctgatggtagtttgtatttctgtgggatcggtggtgatatcccctttatcattttttattgcgtctatttgattcttccctcttttcttctttattagtcttgctagtggtctatcaattttgttgatcttttcaaaagaccagctcctggattcattgattttttgaagggctttttgtgtctctgcctccttcagttaacatcatgctttttgaaaagaggtcactacactcagccgccagttaacaaacaagtgaaaaattatgttctacctctttaagaatatatatatatatattcctaaatcctatatatcacaatcatatatatatatatatatatatatatatatatatagagagagagagagagagagagagagagagagccaggtgcggtggctcatgcctataatcccaacactttgggagagagaggtgggtggatcacttgaggtcaggagttcaagaccagccttagcaacatggtgaaacaccatctctaccgaaaatacgaaaattatcggacttgatggcaaatgcctgtaatcccagctttccagctacttgaaaggctgaggcaggagaatcagttgaacctgggaggcggaggttgcagtgagctgagattgcaccactcactaaagcctgggcaacgagagtgaaactccatctcaaaaaaaaaaaaagcaacaaaacaattttctgcatggaatatctgtttattctctgtatgtttattgtttattcatctaatcatttacttacatcagtatggattcatggatatttattttatacttgggttatcaaccaatactactttactttgttgtttaaattgtttcagcattagtaattgggacttctttcagctgtcacttatatgctttttttaaatatcccaccattgtttatttttattttattttttagcacttactttctttgtggcactatgctccaggtccaccttatatatttcttgtcaagtcctagaatcaagcatttctctaaggagtcctagtgtctttgattggagaatggtattagaaactaatatctggtttctaggtatgctcacttccacggtgctgtcattgcttctagaccttctcagctgacagaacatgaacatagatttattttgatcttctttaatttttttatcagtgttttgtagttttgcacatatacatgccatacatattctgttacatgtatatctaagtacataatgtttagattctattatgaataatatttttaaaatttcaaaagtcaagtgtttatttctggtaaaggggaaagcatttgactgttgtgtattaagcttgtgtcctaaaaccttgccaaattggcttttttttttttaatttctttgggattttctatatagacatatcatgtgtgactagacagttttatatattcctttccaatatttatgtttcatttccttgtcttgtattatttcatcagctaggactgctggtatgatgctgaataggagcagtgacagggaacatccttgtcttttctctgtcttgggggagagtatctagtttctcactgttaggtatgatgctagtagctattttgtagatgttcttcatcaatctgaagatgttctcctctatttttagtttgctaacagtttttatcctgcttgagtgttggattttgtgaaatgttgtgtcttgtgtcaattgatatgatcatattttgtgttgactttcaaaaattgaaccaacctcgcatatatgaaataaagaccacttggtcttcgggtataattatttcaatacattgctaaattatactggctaatgttttattaaggatttttatgtctacctccatgaaggataagggtgtacaaatttcctttcttgtaatatatttatctaattttggcattaggagtaatgctggcctcattcaatgcgttagaaagcgttcctctgcttttatgttttggaggggattatgggaaactgatgtgagttcttccttaaatatttggtagaactcacctgtgaaaccatttggatccagtggtttctttggggaaagattatgaattattatctcaacttattttagatatatggctgttcgtgtcatcaatttctctgtgtgtgtttagattgttcttaatctttctgaaactaaaaaatatatttgataaaatataaaagtgcctctagagattccctcaaaaaaaaaaagcagatttataggcttagaaaatggaatgaagctggtaatgtttaaaaaaaattatactgagaatgcaaaatcatttttgaaattctggtcaaattaataagatagatatcttccctccattacttcaatgtaccatatttttgtttgtttgtttgcatgtatctgtgtgcctctctgtttgctaaattaaaaaaatttctattttgacaattacatgtcatattatgttttattttaaattatttccatatgacctttgtggagaagatttacttaatcatttaagcttattttctttataatagtttgagttgtttcatgatcacattcaacttaatttaactttatttgaaattgtttctcaatgtattctggttattctcattaagaaataggtgttcaaaataccatgtcattattagcatatcttgcttaaagtgaaagccattgtagcatggtttgcaatttactttggagtaacaatggggttttgtgaagaaagattatgtctcagattttattttaaaatgttagaatttcaagagataaatagtcttcttggtctcaactagcatgagaagtagaggggaaatattttcataaaaagtaaaagagactaacaattgtagtttcacgcaaccaatattatattagttgttttaagacaatgacatcatgtagctgtaggatgacaaaaaaaatggcatttttcaaatagcacctttctccataatttgtttattataattatttgaatatgtgataattactaatattgtcataatagtctgccacatttacgaaaacactggacgttaccacctcagcattttaattgctcaccacagtgccattttctttaggactggttgttttgctttcagtttgcttcctagactatcatcatgagatcaaaagctgtgttttttataccacatgacagcccgatgccccacacagggtcagcattaaactgaatttttgataggatcaggtgagccaaaggatgaataaatgagtactcacgttcaggtggcatcaggtgggaattgtggctaggtaaaatggcatcttgttacaatggtaatttcagtcacctattccttacctcttctgggcaggcggattgatttgcaattggcttcttttcttctttctcactctactaatactagatggaaatctcattgactcttaacaacaaagcaattatcttaccatattcacaggttctaccccacctactagggaagtaaaagtatacaggtagtggaaatcttggggccatcttagaatcctgcccaccacaagcagcaaaatattcctactccattatgtttcccatagctaccttgtgtcttccaacttcgtgtgagtggtgtgtttgttgctttgcttatgggcaaagatgattttttgggggagatatttgattaaccttctaatttcttttatctttgacaccttcagtcttccttcatttacctttatacagacttttttataaggccacttttcttttcctttttcctttagggtctcttccctttgcatagattattggaactctccacttacaaagactagcttttatgcttccaactcttgatataaagtttttatctagcatcagaacttgaatgtgagttgtccatgtgtcagaactgtctttcaaaatcaaaagtttcacataccattttcaattaacccaaaggaaatgctaggcacctatttattccacaattatttttaaagtctgtatgtattaattgtgtacatactattttattatttacaaagtgagttaagcacagtattcctgttcaaaatatgaaaataagtatcatggaaaagtggcaaatgtgtcttgtgttccttcatttttagcaccttgttattccttttatataaaactctggtgtacacacagtttttcctcttttctggaaaatgtgaataaattacatttcctttgtacattccatgctgtcttagacaaaatcaaacacttgagtatagaaatgaattgtattccagtagtagataggacaatttttcactcctttcaacttaggcattgtattagttttctacaaataacaactatagactgaacgacttaaacaacaggaatttattttttcacgattctggaggcaaggagtaccagctcaaggtattggcagggtaggtttttccgagccccatcctttgctttgcaaatggatatcttctccctgtgtcttcacatggtcttctctgtgtttttgtgtcctaacctcctcttcttataaggacaccagtcactggattcaggcccatcctactgatctcctttaatttaattacctctttaaagacactaactccacctacagtcggattttgaggtactgggagtaaggacttcagcatctgaatttggggggagacaattcagcctgtaacagtcatgatatgaattaactgctattgtgcatgagatgtctaacgaaaagacagaaaagaagtgtaaagaagtgattactgagatcaacaaatgttgctataggactgccagtctatagctactgcagatatatatatatatatatatatatatatacataaaacaatgtgatagtgggtgatttgtagatggtaatagaccattcagagaaacaagctgaatattttcttacattggaaaaaaagggggacacaaaagaaatgatttcccagcattttattagattccataagaattctgagcatcaaactatacactgctatatatgaagccagatccaatgggaatcttttgattttacatatcgatcactttcaaaataaggatactagccttatttgctgtgcaatattatcatgacatatatttttaatttattgggtctttcagtttttgtgcatctataaagcctaatagttcagcctctctgtaggcatctttgctacttcctatctgaggaaataatgttttattataaaattacaattttttgtaatttagatctctagtttctaagataagaaaacagatctatcatttggggcaagaatagaaacaaaataaactctcctcttaaagcaagggaaacaactttctgaaaaaaaaaattgaagacacacctttcatgtattttaggaacatttcacttttgctcatcttctgactgcattgtgaaccatcatagctagatcaaaattagttatgttaataaacaaaaacaaaaattctgtctatttgccttacattaagagatatccttttgcctgatgcaacaacagaaactaaaatctctaacgaaaaacatgctggcttctctcaccatcgttgtccaataggaaggaatttggtcaggagtaaaaataactcagttatgatccatgttattacactcctctgagcttctttctctcttccacatgttgaatgacttactggtttatttttgccacatacataatgtttggctcctatctcatgtgcaatcaatcttaattattggatctctttcccccctacaatcagatcattttgattattactttaattgtacattccctaactaacttctctctagtttgtttttaacttcaggctacctgtgggcataacgttgtacaattcagaatgtgaattttacacttagcctaataactaaataagcttagaaatttaggtacggtaaattaggtcacttggtaccttttcgtacaaggaaagcaaacttcttgtgtgcctaggtgttgcttttggagaaactttcctgagcattgaggagtcagtgctaactcctgcaagcatgtgagtctctccgactctgtgatgccaacttaccatcttgctgtagtcgaagagctttaggttggagtgaatgggtaccatctttgttcttagaggtggactctaaggaccttgtttttgtaggaacacacaagggctattttagtgttaatttgaacacatcagaagagtttacatcagaatttcaaagaaacgtaggaatccttgttacctttaaatctcaaattttctccatgatataaaatatcagtcttcttttaaaagatcagaaattaccccaatgaccagatccaaatgctgaacaacaaacagtccagatttaccatgaggaatagggttaatatttgctccccaatgacaaatcccaacccggaacagatttcagccaggcagctagcaaagctcgcgggtgaactgcacaggccatggtgggtgcagagctcagagccggaaagcaaacagctgctgtagcctgatttgagttaaaatagtgtgagtgtttagtctggcgcacggcttcaggggagattggcagctgggtcaaacaaagtccttccattggctcccttcccaggcagcttctgctagtgtttaggtactagtgcagtgtagaacccttttctcaggcaaaacctaacatctgaccgcaccctttttgctattaaaaaaaaaaaaaagcttctatttttttcctcctgtcgttaagataaattctccagtagacaacctctcccactaattgtgtattagcaacgtattttatcttgagagcttgtacactgggctctcaacgtggtgtggaaggtagcctgttacagtgctggattcataaaagggcctttatggtttgtgaaagaatatctgtgtgcttagggaggaaactttttgatctgcagaaaagccagaagacatctaggtaaggctacgatatcaaatctacttttttgggggaaagttgggcagtgagactgcttaatcgcaaccaatgtgagtttagagggtgcatgttcacttttgtagaagttcaaaatgtactgacgattgtttgcttattttttgtttgtttgtttaaatcttaaaggaatactgtcgtctgcgtttttacgattttgttttcttctattgaacccattacagtggatatagagttttattatatagcgaaatctttgtaaactgccacagaaagaaagtgttatttagaagggaaattgacaagttttaaagagtaattgtacaatcatttgaggacagaggaacactgcattatactaataagggtttaattaccaaaaaaagtttaatgttgctttggaaggaatattaagtaagttgtctttgtctcttactttttaattttagtcgctgatttagcctgttgggtcacattttttgttagtgctgaaggctgccatgaatccgtaatgaggcccctttgcacatgattttggcacttggccaaaatcaacttcccagcggcaagctttctctaaagaacctggagcaatttctttctttttttttttttttttaaatcaggaatcatgtctgaaagctgccacaaccagttgtataggcatgtcaaaatgactttatacagtcaatatgaaacaagcattaaatattttttctcatgttgttgcttttatcattatgaattccttgcttgttgccacctaagatacgatggagcaagcacagtcttaaagaagatttgctgattttttgtttttctcagcagaccagagtaggtatgatcatcttattgagaagtatacagtgcaaaaaaggtttttcaaaacactacaggataaataacaaatgaattcttaaaactgttaatctctgtaagtaatactcagtgaacagtaagtaatggagttttctagaagtttcatcgtgcgcgcaattaagcttaacatttttatagtgtttttgtctatgttaaaaggtagcatttgggatttttaaaaatgtcagcatttgctatataattttaaaaacgtattaacaccttgatattatttctaacaaatgttttaatagaaatgcttggtatataaacatggctgaataacttttaagtaattgtgtttaattgctgttttgcaataaaaggataatttttcatgaaataaattttgaagctcaaaggtacttaacatccaatttctggaactgttattaattttgatattactataactgaattttgttctgtaagccaattttatactctagtgttttaagagttaaattcacgagtggcaatgaaatactatagcaatcaaatattaacacctcaaattttctatagccattttcaataatatctttagacattaaacataggtactctacagaataattagaagtagaaaagtgtaatatcagttgctctattttgtttttttaaaagaaattttattatcactatcgtaaatactattatgccttgtgtgttaatctgtagtaatccagagtgcaactttattttactagaaacagtcatatttctctttaaaatattgatgagaatcagatacattattttttaagagtgacctaattaagagatttcttaataggcatgtttattctgtatttgtcttccctttacagtatagaatattgcaaattttggtgatagaaaaaatcatattaattttaggtaaattttaggattagaaattgcctcctgatttccttcaggtcattttttgtaaatatacaatttatatttgttttgctgtggaccaaattatgatactgtaaaaaccttgctattagtttaaccgaggaatggagtgtttggaattttcatactagtcaacattaaaagccatagaagttataaattgttattaatagaaatttacctagataaggtctctttgtatgtgagtttacagctgaattcttatttaatgtaatctttgtaatttatataaaagcagttaataaaggtaaatatttcaaaacttggattaaaaaccaaacattttcacatttattatcatgaaacaggtgcaggaaaaataagatagcttctcttgttgagcatgattctcacttaaaaattaattttgaattcaattttaattttaattttagctcttacacacatcttctgtttttattttttgattattttgaatcagttgttgtacttagcatttgaaattgatagattatttttctaatatttactaagaaatgttttaactgaaaattatagggtattctttgttaatcagagcccatagcaaagtaaatgccatcaaatatagaacttttggagtacacagaagtgttagtttgcgagttcagaagaaacttacttgtacacgattactgacaaatgttttttagttgaggtagaaacaagtaagtattaaggacaatttaaattatcttccttactgaaatagctaaaaaaattgctttcttttgctatggcaatgcgttgtaattatttccataatctaggctttttagcagaattattagctagttttccttaggaccaaaaatgcaaaacactgattacatttccttcattgagttaacattttaaaaatactatatggaaatgtaattacttttaaaaagaaaaatattttaatatttttgttgaatttcttcaatttataaagaatagctcgaacaagtttttcgttcatcttttcccccatacttatattggaaatattaaaatctatgaaattttacaatgtggaatctcttttactcttcagaaaaagttaaattcatttatagttgtcaattcaaattatggacttttaccattttaaatgtgacagggttttttgtttgtttattttaattatgcaacaggcacttaaaatactttctttccctccaattaaaagagacattaaataattaaacatcaacttttattctgtattgaaaagaaagctttaccattgcagtattttatccacaattgtttaaatgtgagaaatgtttacaacagggtattttaggtgagcatttatcatttaaatgaagtgctttgttctgaggagtctaaaattcagcaataagataaatgcattgctacattagattgaacatcattgttgaatttttggcacaacttcagtgacctcggccataaaaactagtatagtcaggatgatttggaatttgcagtaacaaaactagatatagaagcacgtgaagacaccaacctttgttgttttggagaaagtatgcactaaaataaaagatgatacctttcatataaactgctaataataatactttgttatttcattaatacaataaaagtgaaatattaaaacagtaattataatctgtaatgcatttgtaaggcttttctcataaaattaactgccatattttactcttttattagatgaacaaatgtcatatttccaagcagccaacatagaactatagcttatataaccaaataattttttaatgttactttgatttatatacaattgatattgtatagaaagaatcacgttagctgattttaagtcttgttcaaataaaagaagcattgatttgcacttgttgcaatttttttactttatattggtttaattttaaaattatcacaaagtaaatattactgtttgatatcattcttaaacattcattttacaagccacctgacctattagctgtttaaacaatgatgatttatatcttgctataaattcttctctcaaagtcaagacaaatagatcagtaaaagaacctcttttttaatgctcaaaattttttcttaaaaaacaaagaatttttttagttttcttttgtttatgtgttcatgtgtatttgccaacctgtgtttttgcctacatcctgaaatatatgtcttttgaactcgaggttggaaagtctgatagcaggctcttaagtttattcttattccatattattttttataaacaaatttattgagtttcttactgagagtaagtcgatatatgaatcaatattaatgatcacatcaaatctgaggatttgcttcctttaaagcgctgaatattcagcataaatttgtgctaatttacgtgtttatagagtgattctaaatatttgattagtattcgttttaaagatttactaattctttgaaaatctggagaactatcgtttgcttaaaaaactaatatctactaaagttgtaattgtctctgctttgctattattgaaatattacataatctcttgtttaaaaatatcatgagactaagctatcgtgcctttctttccatttctcccactaacatctgaggtcaacgtctgtaagaggaaatatctgaaaatatttcaaaaacattttctttcctgtgataatcaactgctttatcatttgcagagattttgaaaggagtaactgttttatttgaatgcttagataaatgtgaggaatatatgggctttctgtggacttcagttttaaaactaaaatagaaagtaagatggagagtaataaaatgatatattttatagcaactaattacaacttgctgttcatacataaacaacacgctggaaaggtagacagtgggctttgagagcagctttcatttactcagtctgtaagaactcgtgaaaatggtgtcaaagggatggtggtgatccattctgtatggtccatggtgctttaagcttatacagtcatttaccatatttaaatccccgagtcttgcctcagagccccaatcaccaatctgagatatttttacaaggagagaggagttacacactcattcttgttcactggaggatctgtgatagcgtttccttggcagaagcagggttcttctctgtatagtgattttttttaaatccctgtttaggtagttcagctcgttcagttggacaaatcagcattataaccaagctgactcagccttagcaaggatcactagtttttcattttgccctaaacctgggcattttcctgaagaatatggacagttgtgcatgaaaggtcaagttgctaaaaattatagaacatgcatgttctacttatgagttactaagttgtgttttgtgttcaaaatagtatatataaatacatgttttgtgtacagaatatttaaacagtgatagaaacagttgttctgaaatttaagttatgggattggctttattccaattctacttgagatgtcatccaaaattacttttcgaaagcactgctttgaaaatttcctgttacagtcttcatgaagtatagtgatctggatatgaattttctgctagtacaggagtttgggaaaaatacaagtatatgactattgcatgttctgtgggattctaatctgatcacatgctctttcctctccattccttgggcccattcataaatattctatggagagttattttttttttcctgtcaacagccaattttagtctttattttaatttatttctttttagagataggatcctactatgctgccaggcctggagtgtagtggctcttcacaggtgtgatcatggcccactatagtcttgaagtcctgggctcaagagattctcccacctcaaccaccaattgtagatgtattcagatagcatgacatttgaaaaagttgatggagagaaaattcctactgaagtgtgttatagatatctctaaaacatctttggttgtcaggaaatgaatcaatgatatagaaacaaacaatgatttgtaatcttggcagataaacagagaaataatcagttcagaatatttatggaatgataacattttcctgttgatatatttttgtgccaacaaatttaatttggaaactggtatttgttactagaaggcagtaatcaattttggtaatcagtagttttaaatgctttattcaagaccaagggctgatttattgaatgaataggtcttagataaaatgtaagctattgggccaacccatatctggaatttgtttttattttcaatacccaagtcattaagtgtaaatgtaatagtatttgcatattttcaactttcagattagtcatgtctacctttgaaatttgttttctccttagataagtaacttatgagtaatcaaatatcttgcaatttccattttccatcttaaagcccgtgcaagatcaaatttgcagttgctaaatcacataaaagtctggattaatagcaaaatgagattatgtagcccaaaatgaaattataaataaagtgcaggtgtttgctaggatttgtgtggtcagatatacaaatagaatcacaggtagagtttctcatttctcacttgagaaaagtgcaattaaaagtaatttccagatgttcaaatgcacagctgctttctcctaaactaaattttgcagaaatgagctaaattataatgggtttaaaagtcactacgttttaatggtttttaaattgaatttgaaacatcattactaggtttaccagatgaagagagttaatgcttatgagtacctggtacaattttcatttaggtggcagcagagccattaacgtattggaaattataataagaccaaaacttacattgggtttgaaaaaattgattagtatgtgtgttgatacactccatgcctttatgagatttatattatatactctatgacactatgaaagttattcagctataggtgaaagaaacgtgtgtatatgttcataaaatggtatgtgtgggggggaggtgtgggtgtgtatgtgtgaaagagatttttacattttctttgcctaatgaaaaggaaaatagcaagaataagatgcaagtacactgtttgaaatatgcaagtctattaaattgtttttacatatcaaattataagcaatgactatgaacctacatatctgtaatatcaacttaaaaaaatccatctattttactcagagttacttacatgcccaatagcaataagctactgtcataaatattatcccattaagtaaagtcctgttcttgactaagttttcttgggcttgaaataggcttttctttgcagccaggaatagccaagttttttctaaaactcttacgggaaggcgtgtggatggttaaacgaggaatgggaggtaaaaagtgggggcattgcattggaatagagaattaaagagcttttaccctacgtaagctcagaaatttatcattaaacaatccattagtatttccacaacagttttcaaagcgcactgctgaaagaatttcaaaaatttgaccttggaagtgattagaaaactgacgcattagttttgagtatgatggtagaacactttatcctatgtacgacgttctttcaagtgattgactcgtgcccttgaaagcattatccatggccagtgattgatggacttgttcaggtcctatgcagagtgcttcatatatctcatctcaatcctctaaataaccatgaaagttgatgattatctcatggtacagatgggaggctaagagtgtttaattttccccaagttccagtgctagtaagtgttgatgtctggatctgaacctgtgttaatggtgtttctagtcgatgctgttatctgttgcaccacattttgaataatcttggactttcagagtatgaaggacgattaaatataaccctttggtataaatgttctctctctcactcctctgtaacaattggagaaacagagttctaacaatattaaaatcagccatagacagagagtagtgagaaatatactttttttaatacagaaggttccctgaagtacttttagtattattctaaattaagcaataaccaatgaacaattttggtcataagcagtttctctccagaaaaaaaaaaaaaaaaaaacagataatatccatgaacaaaggttctataatgtgagtctcttttgcacatcagtggcttaaaataatgagtagtggaatagcataatagggggaaatacctctcagacaggaaattgcactagcttgttttgtcaacatatacattactatacccagagacatacaagagttagagactcacggtgagttttcactgtggccatctgtgccatcccgtgcaggactctactgtggcattccacaaaagcaaatcctcagaagccttctcaaagtgcttaactgccttgaaacaggtgtttctcactagacaacaatgtccgtttactttaaaattcagaatttccccatatcacatgcttgtgaagaaagaaatttgaactctattatagtctagttgttggcaattgttataaaaattagatttctaacctctattgatagcactatacttgaaatgagaatgtgggcataaaatacttcttataaacttgtttttaagttttatgtaatgttggctgttacaggtcaagatatgaacactgaaaattttgggccaaagtcactttttcaacactggcccatttgagttgttgattttagagctgggatcattgaatgttattttttcatacctttattttatgcaacagaaaatgaaggcttaaagagggaaaaatggcctttctgctcatggtcataatactagcgcctggagagttggctttgatcacagattttccttccagttttctattccttcatttatataaggccatttaccctctaaatcatttacatctagttataaaatatctttttcttttcctaaaactttagtagtacagaaatacaattgaaggagatttggcttcgttggtaaatgtagaaataactaataagaggtattgaatataaacttacccataagttattgtttctgtaaatgcacacgattaaaatgtctagtttgtaatttcattcttgatgtatattctagggcacgctgacattttaaagaattttgttgaaacgcccactgagcgtgctttctgaaaaatgaagattatcttttgttttttttcttttttatgagctttaaaaagttttaaataaaagtttctaagatgcatgattcttaagcatacatctggatgaatgtcttacatatgcatccatatgtagttataaacattcgtacatcttctcccagataccagaatataaaaatttcagcactccttaggactctctcatccccctctgacacctgtcaccatatatattaggtttaccagtctttgatttcatataaatagaattgcacagtatgtatatatttttgtctggcttacgttactcaatattttgtccatgtgattttcccatcttgcatatattggttggttgttcttttttgctttgcagtatttatttgtgtgattatggcacaattttaatctattgtgctgtgttagtacactcgttgggtgttttcagatgtctgtttacataattttttaaatgcagaactggtaccaaaaatatagtagtcagttgttttctttaatagatgaaatataaaactagaatcactttaattaaagtactacaggcagttattgctttacatggtcccatgctaactgaaattcatttatatttgaactctgaaaagtgataactcagtatttctgagttatctatgaaaaaaaatcctggaaaaaagaattagtatgtgttatcctaagtagatgctgaagaaccagtcctgcaatatttaaactttatcatcacccatttgctcctgttatttattacatatatacaactgtaattatagtttggaccaaatatccatgtagttaaactcagttgtcactttattttctaaaactccttctggatggcaaaaattttctggtttaaagcaaaataattaagccattgcgttttacataggatagttagggatgattcttaaatttttttttttttttttttttttttttttttttttttttgagacggagtctcgctctgtcgcccaggctggagtgcagtggcacgatctcggctcactgcaagctccgccccctgggttcacaccattctcctgcctcagcctcccgagtagctgggactacaggcgcccaccagcacgcccagctaattttttgtatatttagtaaagacggggtttcaccatgttggccaggatggtctcgatctcttgacctcatggtccacccgcctggtcctcccagagtgttgggattacaggcgtgagcccccgtgcccggccaattcttaaaaattttaaactcaacattttatgtaccatatgagtgaaatgagacccaatatttttgacaatagggataaatatttgtttgaaagtaatgggaatagttttagagatattttctaactattttctgtgatattttttaacggttccaccgttggtgttactatactcaaatttaagatcttttcctctgctaggataacacaaacattgctaatacaaaattgtaagatttttaaatttttcttttattatggaaaaaagattaagttatttagaagttcttaagtcaccaatcgaatatatttataagcttctattgagtgtatcatccaagagctaatgaatatatttattacattgactatattgataaacagtctggggttgtcatctggatatttttcacacttgctagtaagcaactgctttaataaaataaataacatgaaagtagtatattacaatgtggtttgcaaagccgtttcacatatacatatacacattaacattgagagggagaggatatcacagtcttccaccccagacagtaaaataattagtatcctgtagctaagaaagactgagctatgacctgcactgaaattatttttctactgtaaatctgtcatcttttattgcaacaaactacatctctgtaaataatggaacttcatacaacagatccgtggtgaactagtggcttaatatatctctcaaaatattttttaaacaaaatatattttttatttgtatctataatgctacaaaattctcatatgatctggaaattttcaaccatatatgataaatgatttatttatcatttaacacattttcttggaggttgtgtattaaatacattttagcccctaaaaatggtaatatcactttctaatttttttgtttgttttaaataatcagttcaaagttggccaaggtcaatgattcttaaatcctattattattttttgacaactatacaatgcctgatattgattccattcctgatatcagctggcagtaagcttccctctcagatgaagtgatagatggcctgttcataattcatacatgcagtggacactacaaaattccactgctaggcttctccttaattagacgtatttgcatctaataggaagagaagactaactttccaccatgctttgtccctgtaattgtattctaggtattaaaaacatttttaaacatgcgcagtgtctgaagacctgaattaacaaactcatgtggacatttgaaaatgtgtacctgtttgtcctactactatgctacatatgtttggttttgtaaaaatatgggtgaattcatagtattgttctttttcactctgaatgtcaccttgtatctattggtttttactgacccatgaaaatggctggagttagtctgatctcaccatgtagaaaggtcaggttcatggcttggatttgagaacagcagaatgaatcaactttgaggaagaagctgatttaaaaaaaaagaaaatgtctatttacattgagcttataagaaataggtagagatcaagaagaaaacaagtatggaattacttcaggatattttaaaagcacttccatttaggtatccttgactaaatctgtcaactttgtatccattttctcatgaagaaagtgttgaacttttcactagaagtacttttttttattcctcagttaaaacatgcctgttattctttttgtaatacttaagcaatttttttttaaagatatactacttagttcatccgtctccacttgttttttttttttttttgcaattatgtgtttgtttcctttaatacaactgctataaaagcaatcatgttcatggagaaataagtataattcataaaactagcatgccttgcagagatacaagtaaaaatatagttgtgtgtgtgtgtttatttactgagatgaatttaattcctggagattattttaagctttggaaatgatctctggagtaaagaataatatatttcacttttttattaataataatttttattttgaaacattgatatttataatctgaaaatcctatttatttgtttgtttgatatataccaagaaacagtacattgataggtgatcatttttttcactgtatttatttatttttggtaagagaaagtaaattgatatttaattatgaaataactaaatatgtttttcttttgtctagactaattgtgaagtgataaagtacatttcttaccaaatataacattttaatgcatagaacttactatctataatagctatcttacagtcatgatagttattaaggtaatttatcaataagccttcttttggacagaagggatacatctaatttttaaaaatttctctttgtcttttactaagaaagcctcatttatagaaaaccaaatgagaattctggtcatcatggaccctaagagctctcaaatccactaagaaaattgccatatgtgaaatattctcttgcccagttagaactattcattcattgtaggctctgatacccatttgataagaaataacattctgatgcatggctaatttgaatcatatttaaaaattaagtaaaatttgagccataaaggattaaagagatgtagattatctcattttgtagcaggagatttttaaaatttgattacaaagaaaaccaaatactcctataataggaaatgttacaaaattaactgagaatcgtttttaccctattttgttattctagtctctgactggcgtgaaaaagctactagttaaatgattcaggaaagaataagataaacaaagggcatacactgtccatacaccgtagtagttcctaacttctctctggaataattaaaatcaatttacagtcagagcagttaaccagctctcagtagtcttccatgtaatgaatacacttctgtacccttattaaaacacgatttgtcagtgcttctgtcctcatgaaaattatagcttggttgagaatattaaacagaaatgaaccaacatgagaaaaatggaaaataggctaaattagtttaactaagcagctagattttctttatcatgtgccaatcatgggcaaaaattgaagccagcacaaatctctctgaatggctttctagggaaaacacatttttaattaccacatgagcctgttggaaggtaaccgaattcaacaaaaccattaattgatattttatttgaaacctttcctgataatgcttctagcatctatcaccctattcctatttctcttgaagaacagaacatagcatataataggtgctcaacaaatatatgttaaatgaatacatgaatgaaaaaccctaataaagtgaatatttgtatctctaactgagtttctctttctcaatacggctcatttcctcaaatgctaaaagattcttaaagctccttctgggtcgcttatctttcaatgatttagttactttacaaagaaataacatctaattaaatcttaagcatccagagaaatcactttatcattttgtaataatatcagtcaatgaacatgacagtttctgaagatatatgtgtggtaactcgtgatcattgtgcttatatctggtccacaagggaatgaagattgttaccaaggatgtaataatttagtgtgcaatacaatttaaaaatagattaaaaactgagatgtaaaaatggcactcagcctgtttttggtttctttgtgttgtattatagtctcatattttgttttcaaaaggtaattgtctgtcaatgtgtttagtcatttctttgggcattttttgaacatggtacatatagaccatatcttcataaaaccaacaacttttatttttgccatttataaattcaagtgtactcataatgtatatatttgtattcagttattcagaaaccttagtatttaatgaagatgtacagagaaatggcataatcaataatgaattggtatagcacctatgttggagcatcttttatttagtgcagtaaaatggagcagatgatttctattcctaaaagtatttccccacttgatttaatggtaaatcctccagatcatagtattactattctagcattcatgtctgctgcctttagctttctgtgtgaaaacttctcatcaggaaatttcttaactaatcaccaggaagatttaatcaaaatcagtttagttactaactaatgtaagcttaggggaaagagagaagggaagtgtataacgattgaattatttgactacatattgttaacacagatataaaaatccatgacttctctcccttcctcctccactaaaaaaagaaattgaagatagttgggaacaaatagttgttaacagcaaaaattaaaaagaatactagcagctaccactgcctctagagagtgtactgggttctagtagacaagtagagcttttttaaaagaactgatgctggagacggtaacaccaattcaaacctcacctctaccactaaccagttatcaaatcttgacgtttttttcttacctttgttttttatctgtaaattggtaataataacaaacttgatttcatagtatttgttaaacaatcaaaaattaataatgtctcttccaattaaatgaagatgtatacaatttaatccagatttaggagtgaacatgaatgaaatgggaaaagaagcatgttcctttgagatgttacacttttttagtataacatcattgaaaaaagcatcaaagtattcaacatgttgccattatgaaggtaaaaacagaaaacagagtggcaagtttctgagagtattaaaaagtagtaaatgttgactgcttcatgtttctttaaatcatcattaactggagggtatgccagccatatcttccatgaatattttcttttgaaacatttcttcaaggaaccttaagtacattaattaaactagggcaaaacttcaaaagacctacttcacttttctttgtgcaagttcacataagaaaaagcaattaatttaaaatccaagtttcatgtattcccagctttccagttgggagaagatgaaatatacatcctcaactctcctatttctttctgaactcaatcttctcattctcttttttctttttttctggcataatgggttattttgattactattaaaaggctgaatggtgttgacaattatcttctttttacttctgatgctaattccattgttcagtaaattaagggaaaggaataccagatgaaacttggtatgatttttaaagtctggaaaagaaatcaatatttagcttaattattgtcttttatgtacaggtctgagtatttacatttggaacaatccttgagcttaattctgctgtttagacatgaaatagagttccaaaatcaagttaacctatttctcattaagatgtattagtttcagtgtatcttgccctgctaaaaacaatcttttttaatgctctatgttttgatctatttaatttttttaaaaaaaacataatagtagtttccagtatggaaaatctggttgtctctaattcagtctctttatactaagtccagtagatccattttaagagcaggatagacctttttaaggtgaatatctttcagaggggaacacagtgtctgatgtatgctgatctaaatctaagaagttttttccaatctgagatctcttgccttacagatactgaaagcatcagtgtttctcttttctaaaattttcacacaaatttcagtcctgatggtgtgatttttttttcttttgccttcaagagctaacacaagacataaatcagaaacaaattaactgaaaggaaaactcaaaaaaaaaaaagaaaagaaaaaagaggatgctttacgaagggagatgatttgatggtgggtgaaactgtagactaggttaatgcaaccaggttaaagaaactagagggttgaagtacaataaagggtgtccagaattcttaaatgcagtaaaacaaacaaacatgtagcagaggggccttgtctagggtatggatgtttttcgatttaaacaaaaaggaggaaaaataaccaaatgatctagcaattccttagaacgtctgtatactatctatccaatgtaataattaatccaaatcatctgtcactatgcactgccactccattctgataacaaccctctaaccatgtctcaccaggaaataacatttttattcatacaagttgcaggttattttcaagacagacttcctctgtgctgttcatcatgcataccttagctaaagtattgtagctagaatatagcagcaattttccaaccgatcttcgagtctttattccttcaggtatgttgtgtgtactctttccatttgcctaaattttctctcaaaaattaagatcacatctcacattttctaggaatcttttatgactttgttgctttgatgtccatgtcccaactgcacaggtaaaggttcatcatagccttacctaaaccctctttctggtcttatttctctgatggttatttccacagttagagctgcaggaagccacttctttctttaacacatcatatcaacttccatctattttagttcatgctgcttctgctataaaaactcttactgctctttgtctttacctaaaataattccacttctgatttttattaactatatcagtttgggcaacatattaaattgcttcgtgcctcactatgaaactctttggttccagatgtatttagaatagtttgaattttagaaaagttagagtggttatgctatacattatgtaacatccccagcaaggtcttgggtggccaaggacattaatatgtatgaataataacattaaagtcagtaaatagatagtataagtagtttttgctttaatgttaattgattccaaacttgaaaagtctttcatgtttagaaattattgtgatttggaatttcagaatccaaaaggagccatgtatctctagtgccaatctcacagacttgaggtaaagattaagtgaggcgacacatttaaagaacttgcaggctatgtgcagtggctcatgcctataatcccagcactttgggaggctgaggtgggtggatcacctgaggtctggagttctagaccagcctggccaacatggtgaaaccctgtctctacaaagaatacaaaaattagccaggtgtggtggtgtgggcctgtagtcctcagttacttgggaggctgaggcaagagaattgtctgaacttgggagataaaggctccagtaagccaagattttgccactgtacaccaacctgagcaatacagtgagactcggtctcaaaaaagacaaaaaaaaaaaaagaaaaagaatttgcgaatggtcaacaatcattatctgtaactgttattatcaccatcacctgtctggtgtttcatttaaaaaccttgtcgcctgcaaaaattccttctagccaatcagaatttattatacaattcttataagaacattacagatgttactttttgcctgtttgtgtgattcgttttttatatgtttgtttttacctaccccaaactttaaaatatttgatagcaatagtagtttatgttttcaaatccacatcacattccaagctgcattccatagcatctctatctcttccctctggatttgtcctccacttccagtgaaaaaaaccagtaatattttggctttgtagaaaaacttatttttattcagagaaattgtgacttcctccattttgcctcttacggacaggaacttgtcattaatgtgcagtagaggcaaacattccttcttggaacaggatctctgcttctggctgataagctaggtgctgctagaatgtaaatgccttctaacttgggtaatagttcttagtacctttcataaagtcctctcttatttcagataaaatttgaaggaactgtcacagatatttaaaattatcaaataaattataccagaaaaactgcttaaattttaataaagtttgtttttagttgagagtgtaaaatatgacattttattttcttaataagtttatgtggacttaaactatgaaggtctaagttttttgttttcctcatgtgtatagacctccaaaattctttgaaattttaatttgggagagtaaaaaatttgttcaggagagtaatttggttcagagtattaaaaaaacaaaggtaaatttagaacttttgtggttaacataaacaaaaatcccttgattcattggatttataataacgaagagaaaattgaaaattagttaggttgtttggagttaggaaggtagaatgatgagagaggaaaatggaattcaactaacttttttgaggacataacctttattttatttatttatttatttgagatggagtctcgctctgtcaccaggctggagtgcagtggcgcgatctcggctcactgtagcctccacctcctgggttcaagcaattatcttgcttcagcctcctgagtagctgggactacaggtgcccaccaccatgcccggctaatgtttgtatttttagcagagataggatttcaccatgttggccaggattgcctctatctcttgaccttgtaatccacccaccttggcttcccaaagtgctgggattacaggtgtgagccaccatgcccggcttaacctttattttattaatatttgtttcttccccaaaacttgcatgatgagtatcattaactgataatactaaattgatcttggaaggactttctgtgaggaaacattacttagtgttgcctataggtatttataagcacctataatagctcaattgaaatgttgcagaaaaattctgaaagacctttacgaggtgtatggaaatgagtgaagaataaagttgagagagaaaactgatggcattctgaaagggaaacacattgtatggaatttagtgggttgtttgttttcttaacctggcttattgaataagctgaactttcccagcctccatcctttaaaatatgaacaccacaaataacaggaaagataatagcattggtttccaagaagagctctacatgtaagccatgcattgggtctctaaggccagtaaccatagcttttgaaatttcaggaattctctttagagtcaccatcttcaaccttaaaaatatgaatttaaagactgaaaagaataagaaactctttagttaccataacacagaaattctgttgtgattttagttgtatgtttattttttaagagttcaaattaaaaaagacaaaattcccatcatttcaataacatttttctcatggttatttactctataaagaagttattgactaaagtatttcaatgctaataactgcaactctaacatgataagtatgtattatttgaactcactatgcaattgtaatccagaataatgcattttaaaatttctaaaaatcaaatgagtctgcttgtaaaatatttttgctggcagcctttatagaatattgaaaataatagatttaaagtgaatattctgattaataatagatgtcaaacttgccaagaaaagtcagtagaggatacagtttttgaaatcttatgtttacagaaagataaaatgaataaaacaggaaaacaagccttaccattctggactatcacatttgtccacattaatgtccacattaatgtcaaatttaatgtctacattaaaatgctcgatgtaggctgggtgtggtggctcatgcctgtaattcacactttgggaggccgagacagggagatggcttgagcccaggagttcaagactagcctgggcaacatggtgaaaccccacctctacaataaatttaaaaattacccaggcatggtagtgtgcgcctgtggttccatctactttggaggctgaggtgggaggatcatctaagcccggaaggtggagattgcagtgagccatgattgcaccactgtactccagcctgagcaacacagtgagagaaaaaaaaaagtgttcaatgcaatttaaataacttaaatgttattggggaaaaatagtgttcttcagatatcatatttgcttcaagcaaaaaaataacttcagttagagctagctggaataatgacagatttctagattatggtcaaaataatgccattaccttgtacctgattgctgcatgtaatttttgaaaacaatacaaattgttttacctgaccttttgggtatcaaagccttctcctatctaaatgcaatgatgatattaggtaaatgcagaataattctgaagttatgttttagacttaaaactgtatgtatttagaagcatgaccaatttcatctttagtaaagcaatacctgaaaaggggggttttagtattttaaacattgtcatttgagcttagaagtaacattttttccttctcttatttatttatgtatttatttatttatcctttataggtcttattcaataccaagaattcctcaggatgtccatttttttgttttgttttgtttcttattatctttgtttttttttttttttgagatggagtctcactgtgttgcccaggctggaatgtagtggcacaatcttggctcactgcaacctccacctccctgaggttcaagtgattctcctgcctcagcctcccaagcagctgagattacaggcacttgctgctgcacccagctgatttttgtatttttagtagagacatggtttcaccatgctgcccaggctggtcttgaactcctgacctcaagtgatctacctgccttggcctcccaaagtgctgggattacaggcatgagccaccgcacccgtccaggatgttcgtttttaaataagtcaccacagcttcatatttaaaaaaaatctttaattaaatttcaaatcttgagctgaatttagtataatattaaacatagtttagtaattacatatcatttattgttgatagttttgcatatgaatctatgtatagctcatttaaaaaatggctttagcatgaagtataaacagttgaacaaataaatgagaaaaatgcttgcttagaaggaatggaaattgggtcagcacagccttgcctttgcccaagcggtggagttgagaaagtattttgtctacacaaaagccagacagctactctaatgcccagtgaattctgacagtatgttacagtttaatgtgatgaatgatgtaaggacccgcctaaaatgctcacgcagcttcccaatgtcttaccctgacctacaaaccagctcataggtctccatgcatgtgttgtagaaagtgatgtagatggccaggcggggtggctcatgtctgtaatcccagcactttaggaggctgaggtgggtggatcaggaggtcaggagtttgagaccagcctggccaagatggtgaaaccctgtctctactaaaaataaaaaaaaattagctgggtgtggtggcaggcgcctgtaatcccagttactcgggaggctgaggcaggagaattgcttgaacccaggaggcagtggttgcagtgagccaagatcgcgccactgcactccaacctaggtgacagagtgagaatctgtctcaaaaaaaaaaaaaaaaaagaaaagaaaaagaaaaaaagtgttgtagattagttgaggatatatatagggagaagttacttcaaaaatgttattttttataaaagtctttttgactgtgtttctcacccacttaaacacctccagggtagagactgtttcttatttatatatattcagtcttgtatatagaggatcctttcctcatgaatgtttatagaataaagttagacattagaaacaagaatgagccttttgcttcttgttgcctgcagggctaaggcgaagctcatggaataagtctaggatgtttgtttttatatgaactgtggtgtaatagaaagagagcaagaaagaacagcagtaagtaggacaagaattagaagctgataagttagtccttctactttagcttagcatttaaagcccatcccactattcttcagcatatgattcagttgatgtgaaactctcactggcttttcatagctctatacatttgcacatactgttctatatgcataaaaattcttttattcctttttcacctgaaaaaaaatatctgctgatcctttaatactctgacacctcatttgaaaaagcttgctttactcctccaggcagagttgattgttcctgtctgagatgttacctatctgtatcatagtgcttttcactttgacttacaagtattcatttacatacatgtctgctctcaggctaaattttcagctcctcacagccgggactatttcttgttcatttctgtattccaaccatcttttattatgcctttcacagttggcattctatgaaaggctggttaatctttctaagcattaaaccagccttttggaaaaataatgtaatatatttacagagaaatgatatatgatggcgaacagtagtttatgctctctgttgccttgtatttctccacaaaagtaaataacaatgacaaaaacacaatatcaaatttagaaatgaaacaagatttgtttgaaagcatttatttgaataacttaaatgaaatagtcagagcagtataaatagcatactacaagaaaataaagtcataaagaaattttcaaaactctctgccagcttttcatagacaatagaaaattagaatagaaaaaaatcattataggacatcctattcaattacatcatgaatggacattgaataaataaatggatgactgaagcctagaggctagaaataacatcctaaagtcacatttgttagcatctgtgctaggattagaacccagatcccaatgccaagtcaaaagtaaaatcctcacttttaaagtgctgtgtcttttttaacttttattttcatgtaataattatagacctacagaaaaagttgtgcaaataacatagagagtttacatatgtccttcacctagtttcccctaatggtaacaatgtacataactatagcataattatcaaaaccagaaattaatataaaattcaggattccacattgcctttttttgttgggtctccatcttctcactatgttgtagtttctcagtctttggcttttatgacattgacacttttgatgagtactgatcagttattttgtagaatgtccctcaatttgggtttgtctgatgttttctcatgagtactttgttgttgttttcttttattattatactttaagttctagggtacatgtcacaacgtgcaggtttgttacatatgtatacatgtgccatgttggtgtgctgcacccattaactcatcatttagcattaggtatatctcctaatgctatccatcgcccctccccccaccccacaacaggccccagtgtgtgatgttccccttcctgtgtccaagtgttctcattgttcaattcccacctatgagtgagaacttgtggtgtttggctttttgtccttgcaatagtttgctgagaatgatggtttccagcttcatccatgtccctacaaaggacatgaactcatcattttttatggctgcatagtattccatggtgtgtatataccacattttcttaatccagtctatcattgatggacatttgtgttggttccaagtctttgctattgtgaatagtgctgcaataaacatacgtgtgcatgtgtcttgatagcagcatgatttataatcttttgggtatatacccagtaatgggatggctgggtcaaatggtatttctagttctagatccttgaggaatcgccacactgtcttccgcaatggttgaactagtttacagtcccaccaacaagtgtaaaagtgttcctatttctccacatcctctccagcacctgttgtttcctgactttttaatgatggccattctaactggtgtgagatggtatctcattgtggttttgatttgcatttctcatgagtactttgaagttatgcatttgggaaagaataactgctatgcccgactcagtgcgtcctgtcagcaggtacatgttttcaacacatctaattactgaagatgttaaccttcagcacttgagtgaggtggttcctgtcgggttttttccatgtaaggttactatttcttccttcataattaatatatttgcaggaaatagtctgtttttcttccatctttcacctactaattttaacattaatggtagatcttgtctgtaacaattattaatcttgtgtttgctttatgtgattttgttatgttcttcattccttctacatttattaattgggattcttttaaaggaggtggttcttctcccccatttgtttggttatttaattatataatttacatcagtgtggacacatagctgtttatttattttaggggttataatccctaaatagtatcattatgtattttgttgtcaaattatttcagcttctgccattgagaatgcttttcaggccggtttcaatatccattcaacatgtcccccattttttctagcactttcttactccttgccatcacaagatattccagattcattttgtatttttcctgcccagtcttctctgattttattctaatgggatagattaattctagtcttctgcctttccttgtttctaatttttttcaaacaatgaaaaattaagctctcattatctacaatatgtttacttatttgttcaatcccggtacacacatcaagtagttacaaagttgctaaaccttgtctctgtaaaaacagatcgactgatcatagtaatgtaatagagtacagtatattcaaaatatttttactaagtgctaatatatttaaagtaatagtttgttattttcttcccaccccattcagtgtggtgatgtcattcatttataatatagctagcttcattttttactatttgtattccactccatgtccacctgatatcctggtttattttgatttttttaagttttggggggatatgtgaaaatcactatggttctaagatgcaaaactattttttagaagtgacacccagaaaggtgttgttccctgtagctccttccctccgtgttcccattacacccttttccctactcatttctcttccactccctgcagcttctgggctttccttcctgtatttcttttgcacaaaggagaagatacatatttattttcttatattcctttctttcttacacgaaaggtagctacagtagatactcatttacaatttgctttcttcaattaagagattatcctggaaaccactccaaatcagttcatagagaccttcctttcttttttacaactgcagattaccctgttgtgttgatttaacataacacagtcatgcactgcataatgatgttttcgttaactatgaactgcatatatgagagtggtactataagattataatggagctgaaaaatttctatcacctggtgacattgttgccattgaaatgtcatggcacaaagcattactcaagaagttgtgttgattctggtgtaaacaaacctactgtgaggccatttgtataaatgggtagcacattcaattatgtacaatacataacccttgataataaacaactatgttactggtttatgtatttgctgtactatactctttctcattgttttagagtgtacttcttctacttatatattttaaaagaaggttaattgtaaaacagcctcaggcaagtcctccaggaggcattcctgaagaagacattgttattacaggatgagatgagagccccatgcatgatattgtcttgaagacttttctatgggacaaaatgtgaaggtggaaaacactgatattgatgattctgattctgtgagagccttggctaatgtatgtgttcacatcttcatttttaataacaaaattaaaatataaaaagcttagagagcggtgatataaggaaaaatatttttgtgtagctgtacggtgtgttagtattttaagctaggtattattacaaaagagtcataatgtttaaaaattgtttataagcaataaaagtgacagtaagctaaggttcatttattattgaagaaaaaactatttttaagtaaatttagtatagcataagtgtacagcgtttatcatgtttatagtagtgtacagtaatgcccttggcttcacattcactcaccactcacccactgactcacccacagcaactttcatcctacagctccattgatggtaagtgtcctatatatatgtgccattttttatcttttacactgtgtttttaccgtatcttttctattttcatgctctttagatgtacagataccattgtgttacagttggctacagtattgaatacagtaacattctgtacagatttgttccaatgggctatactatataatccatgtgtgtaataggctataccaataggtttaagtaggctatattaaagtaagccataccaatatgcttaagtatatatacttaagtaggctataccagtatatttaagtatgtatacttaagtaggctatagcaataggcttaagaggtctataccaataggtttaagtaggcaataccaataggtttaagtacacaagtatgatgtttgcacaatgatgaaatcacctaacaacccatttctcagaacatattcctgattacttgagtgatgcataactgtatattcaacaaaattcctttccattagcaataggttgtttccaatatttgtcaatgaaaaacaatattgcaaagtatatccttgtgtcatgtattttctaattgtttacaatatctttaagatagagtcttagaagttggactgatttctctccaaaagggttagaccagtttgtatttccaccaataatgctgggagtgtgtatgaatgagttaatgatgcttaaagacataaaagtagacttgagcaaatggaaaagacatactctgtttaaatctactggtatagctattactacagtgcctgttttcccacaatctcatgaacagaatgcaatgtcactaattttggttgatccgagaattgagaaacaatatcgcagtgttttaatttgcacttcactgattatgattgagttcacatattttaatatgttggggggctggctagactcagtggctcatgcctgtaatcccaggattttgagatgctgaggcaggcagatcacaaggtcaggagtttgagaccagcctggccaacatggtgaaaccccatctctactaaaaatacaaaaattagcccggtgtggtggcatgcacctgcaatcccagctactcgggaggctgaggcaggataattgcttgaacctgggagtgccactgcactccagcctgggcaacagagcaagactctgtttgtataccttttgtagaaattttcagtttgtttgtttttccagtttttatgtttttgatgcgttttttgcaatttttaagaattcttgataaatcgtggatattagccttttgtctgtggttgtgaatattttctcccagtttttcagatttattttaactttgcagattttatcctgcagatttttatattttgtatgtagtcaaatttatgaattttttatttcattgcttctgaattttgatttgtatttagaaagcctgtttttaatccagttcatattcattcatattttctggtacttgtgttgtttcatttttgcatttagatctctaatttgtttggagtttattttagtgtatactatcagatatgaacctaattttatctttttttcaatggctagccagtagttctagcaccgtttatgaaaaagtttatcttcaccctaagggtttgagatgccacctttaacatgtgccaagtttcagtatatacaaggactgtttctgcattctatttttttttggattatttttctatttatatgccagtacaacaggctagtatcagagacttcatagtatatttgaaagtatagtagtgtttattccttttatagtttttctttttagtgtttttctggctattttttcatgttgccttttaaaataaactttagatcaacctaacttcataaaatagcttgctggaggttttattggaatttcatcaagtttacaatttaccttagaactgagatctttataatgttgagttgtgttagacaaaaacaggatatgtcttttccatttgctcaagtctacttttatgtttttaagaagcattaaaaattccttaaattaatatattaattcctaaatattaattcctaagtacttaatcttctttattgacattatataaaggatttctctatcattacactctttattcatttattagtatattgaagctacttatttttatatgttaatgtgcatcaagctacttactgcttctttaattgagtttgctttaacattgattttataggggtttcatagtatactgtcatatcatctggaaacagatatcgtttttgcttcttctttaccgattcttgtgccactaattaatatcagttatctaattatatcggctagtatttcaagtacattgctgaatatccataaataatggccaagcttacctttgtcccaattttagtggaaatacttcttctcttttctcactaaagaagatacaggtcttggactaacatatatatgtgtgcgtgtgtgtgtatatatatatacacacatatatattgcttctggaatatgtgtgtgtgtgtgtatgtgtatatatatgtgtgtatatatatatgtatatatatatatatacacacacacacacacacacacacaaatatgtattagtccaaaagctgtatcttctttagtataggttttaaagtattcctccattcctatgttcttcaatatttttgtatcataaatggttgtttaattttgttgaagattttttcagcatctatagagatagtcataattttcacctttagttttctaatataatgtatgacagtaagaaatgtttttacattcctgagataaatcccatttagtcacagtgcattatttttaaaacatatcattgaattctgtttgttaatcttttatgtggaattatttatgagtgatagtggtattttgttttcttccttacaatgtctttatttttagatatcactattatacttgtttcatagaaggaattatgaaattttaattccttttcagggcattggaataatttttagactcttcaggctatatggttgttgaaattagttaaaaatctcctgtgaaaccatctgggcctgttgcttttttgtaaagtaattctttgatagctctctttgtttttatgcattgatctgctaagatttataatggaagttgagtcaatttggtaatatctgtttccctagggaaactatctagcttttcaattgtatttgactagagctctgagaagcagtcctccgggggcgtgtgcatgtgtatgttttaatttctttactttcaaagattatttcctttttgtcatttcttattttgaatgtttatatgttattgctgcattttcttgattaagttaactagtagtttttctctcatttgttttccttaaaaataggataatatattagatatagtttttcaattatcttattctcaaatcattttcttcttttatttttattatttccttcattatgatgctttgtttttgtttccttttttgttctttcttaaagctttttgagaagggaatttaattcattgccttttattatttctttgtgattaataaagcctgacttttcttcgtaattaattaatcttcgtaaggattttgttaaagatgcagatggatgggccccacccatgtatggagacttagtttcagtaggcctaggtgtgacctgaggaccagaagcagaatatctagaactacactggagaaccgctgatgcaatattaaaattttacaaatgttcctctcaaggaatgtttaattccttatccaatcattttgttattcagatgcattcaaacatgttatggtgttttgctggtaggtgtcctccttctagacctgtggtattttgacttaataatcgtgactcatattcgaccatttaaaacttgcttaggttgacaataggcaataccaagagtctcccttagataaaatatcacagtttcctaaatctgtcgctcttatcttctaaggcaacagaggtcagaggagctatactaaaatcttaactaacaaacattttaaaatacaactgaagaatgtaatttgtaacaaatttgttcacaataatttttaaaaatccctttgtatgtacactaagtaactgaacattttagaaagactatcagtgatgagaaaaatacaaataacatgaaaataaattatttggaaaattatgctacaaaactataaccactgaactcattcaagcatcaaaaatattagttagaagccttgctctaatgttttggaggtttcccaagactttcaaactactaatctcacttcttaatataaggtagagcaagattctgaaaagtctttgagtttttagttttgctaaagctgttgtttcaactgagcctaggttatacaattgttaggctgaggtctcatcaaataactgaacaaatggactaatgaaagcacctcatatctataattatccacagaacacaaaggaaaagaatgggtaatttcactgtctatattacattgggctggtacttttgttgtgaagctggaatattgaagatgcagtgtaataattcagaggttatttatatatcctttaagactgatactatctgtacattgcacattggcatttatttctacagatttattttggtgtagctggtatgggagccataaagtaccagtgttcatttttccagggatgaaatcagaagagtgttagagaatggtcttcttcctcaagctatcagtgtgaatctctgagataactagagtctgaaaaagaagttcaaatctgtcttaatttttcaggccaggatttctctacaaaactaatcttcaatttagatagatatatgacccttgattttctttcataatgtttataaacgtagagcctcttttgtaattttttcagaactcctcaccttatgctattggggacaaagcaaaagtcaggaaaattagactaatttggaaaatgaccacgttactattgctctggagtaggacacagttggagtttatcaccaagtcattttatgtcccctagtaatgttcccatctcccaaatcctctgctaatattcctgtatctttcagagaagagagaagcaactctatagaagaattatcagcaaaattgctctatgcaacgaaagtatcttaatccactgaaagtaaagcaaatcttgtcagtttctactttgatttagaagattaaaaaaaacaaacaaagttatacataacagatattaatgttaatgaaaggaagaattacaagctctttctgtaatttggaatgatatgaaatgtctgaccattattttgttataattctttactataaataagactaaaggaggatcaaaaaatttttcacttaagaagtaatcatacatttctataaatatttaaatatcaattaaagtacaggtgttttgctattcaacagatgccttataaggacatatacaacacaactgcattcatttcagggttttgaatgtgtcaaaaatgtcctggtaccttgctcagtagttacaactagtaaactgattttcacaaagatctgagtcaaggttgttgttaccagatccttgttcaaagacaccagatactgtagttataatatattatacacatttcagcagtcttttaatttaagaaactattttgagctgtacttagtgcaaagggcaagcgatagtgactgttacattgtttcttttagaaacaaacattgtaggcaggaacacactaaatacaattttaagcaatactggaactaaatttggtcatgtataattatttttgaaacattaggttggttagttgatgttctagatttacaataagcagtgtctattagagagagtttcagggttttttattttactgtggagggaaaagaaaatttgggggtgcctaagtcctgctatgatcataattagttgtgtgattgtaatcataattttgagaatagtaatatatcagttaccacgtattccatatttacttgtggccaggcatgttgctgtatactttagattgatgatgatgggattgaaaaaccaaaactagtattatcttagacatttttcacatgcagaaaccagtttcaaaaaattaggtaacatccaaggttaaacttctacataatttaaatttatttctaataatgacttcctttctttgttaagctaagtttttgaaaatctgctttgatcatgcaatgtaattgtgctgtaatatggcagggtagagtcaattctttggtctttctggataatagtaagaaaattactctaaacagggacatctttggactctatcactgagtccagtgtaattgggagcaacttggtaatgggctttgattgtacctcgttttctacattgctataatgaacaggactgtgtatttgatgagagtcacaatggtatgatgagattggaaaacatgatattacagatgctgtcatatgcaaaccatggcagaagtacttagtgaacaatgactgtaagcattttatgttgcctttcattgaaaatgttttataagaaaaaatttttgcattccatgaagtgatgatggaataattacattttcgatgacaaaattgcgcagcaaatacatcgcataaaagctaaagagatgactataaaattgagtaaagatgccaccttctctacatttgtatatgtatgagtaccttctccaatgttctctttttgtctaattgaactgtgggaaagtgtaaatatccactgagttgagtcaatattaatgtggttcctagtttctatttttcatttgaactcaagttattgagaggatgatgttaaagtctctaactcatagctttgactttaaaataactaaaaaaattgtatatgctctaactgtattgagtaccaactctgctatatactctgcttgagacttgaggacagaaataaatgatttcatatattggttgagatatacaagtatataattgattatccaagtttttttacatgaagtgtatggtctataaataggtttcaaggcattcacagaaccctaaaattgtatgcaaatcactttctgtctatggatgtgaacattttcataggcaaggtgttcatggatttcatcagcttttttagattctcaaaaggttcattatgttaacaaagttagaagttattaaacctctttctccttggcaatggaaataacctagtttgaggggtatatgttttcatatgtgatgaaattttggttcagaagtttcgtgacttgcctaaggtcaagtaattgtttaatgacagatctagaataagaatagtaagttgtcttgtcacctagtccaggcttgttacccaccatatagtttttatctcattgacattatctcattgtttcttcaaacgctagccatatagcctgaagcatttgttttctgcattttcctatactattaaatggaaacatcgccttttatgtgctttcatgtttaatagggaaaaattccaaattgcattagaaaaccaaatcgtaattcagtttttattttggctcattctttataagaagcaaatgacaaccagaattttccaatgtaatttcccaggggagacctagtctcagaacattgtttacccaaatcacagtatcttcgacatctaatgatcattgattatcacaatgataaatcacaaaagaaaaattccattgtatttactgtatgctctaccatctagggcaagggcataaagaaatgattttggatacttcaacagaattgggacaagatattcttgttaagcctctacataggtattattgtaaacctgaggagtccattctccatgcattcaagtcataggtgctctggttttcctttctttctttttggttttttttttttttttttttttttttttttaatcactggggtttggtatctctatggaaataattaaaaactctcaggaaaatggcacttctctgctctcagttcaaatgatagtaagtcagtgcattcttatatgacttcagaagctcacttttaacaatgcatgtgtgtatatatgtgtgtgtatgtgtgtgtgtgggtatacacttgaaggttgattaactcatttataattcatatatgaacacagtaccaaagcgtttacttatttttaattaaaaattggaaggcatgatcttctcacaaaagggaatgtatcactcctattttttcattaggagaggaaaattcatgctacactttatgtgtttatctaacattttgtaattctggggctgaaaaatagaaggaaattaggtcagggttagcctttataaaagacacttttactctgacataccactgggtggagtacattgctagcccagagactaatattactctattgaaaggtaagaatttctgtgccagaagaaactcctgatcagttttgaggttttatgtattgcttctaaaatctggacatgtttaacaatggctaagtgactagaatataataccaacattgactatgctctggcattataactttcaagtttcagtccatcatccctacacctttgggagatatgcctagaagactctgagagaattatgtggatgaaggccattttatattctagtcaaaagagcaactgcagtttggtctgaattagtgttttaactctacatggaaaggcataaagcttctttttgataatgaaatcaaactgtacccaggtattgaatttgactttttatttcatgttgctttgatatagcttattttggagctgagcctaatcttataataaaatgagcttctctacgatgccctgtgggactattattgtccatagcatttgcctgaatttggccttcaggactttatgaatgagaataatttcctagtaggcattagctctatattattttcagtttccccccattcccctctcctctctttaattttttctctctaagtgctgggaaaaggaactctactaatcaaatctaaaaatctccaaccttagaaatttattgtgctttaaattttataatctaataaaattgagtcatttttacagaactatttaggatctataattctaaatatatgtctttatatttcaagtaaagattatgttatatgaaagaaagaattctcacattgatcattcttttgccttgtttcttttattcctttaatttcattttcctgctcacagcacccctttattttttcttagcttccagctctcaaacctcgccctatagcttttatgcttctaaacttcccctcctgccccatttccattctaaatggagttctctttcatctttttttttaacaacctcatattctgcactttacttaatttttcttcccaacgctattaaagattctttatttctcccttcacccaagtatagcatctcatctatttctctatactgaagatgtggtttacccaggggaggaagtttctcatgcacactgctcagtgctgggatgatttcagtggtgccagcatattttaaccacatcattatcatgtagtcccaaagccttgctcactgaaaacaccatctttaaaaggatttagtttccattaatcaatttcagaacttgaaattcaagcacggaaagcatttattagaatgttccctacttgttcccacattcatttcattctcttgactatccaagaaaaaggaattgtgcaaaggtcttttctctctccgtgcttacctctcctttctataacccaccgagccccccaagtctattctttcatacagtagttaaatcagagcatgcggcaggaaggcattgtgtgaactggtggccacacaagtactttgtattcactagaggtttagaagtacagcagctgcatataaatatgcatagttgagagattcatgatggtgcctcctcattctagtgctggttggctgcagtgcaggcactacaaatcaatgaacattttccccatccatcagctgctcgcttgcaagcagacaaaacacttacaatgccagaaacccacagagagctccttagtgaacgaaacctcactgtcacaagattcaaaatagccttctccctcccaccctcaacctccacagctctcgacctcaaatgtcttttttttgttaatccaacgtggatcgcaagtacttaaaaaatgatgccaggaaagaaactggaaaaacaggagcaatgatagatcagagttttgagggtcctcacatcacacttgtcacaaaacaaaggcttctttgagatttaacccttttagaaaataaaacccatcataaagatgaatctgcttatgttgactgtactgctttacaattgtagggtttgagcgttgaagcatttaagtatgcaaagcattatgccaagctgtgtcagacatttgtaatttatctatagttactagatggctttgggtattgaaggaattatgattgatgatatgagaagaataaatcatagatatatttaacagtagaaatcatatttctctctttgagcaattttttgcagagaactcagatgtatttatattgtgacaattcatgtagaaactttaataaagcttaacgtcacttaataaaatttcatatgcaatatattagtgaatcaaatgtatatttcttggtgaaaagatatacattcattacatcttgagaacaagtctatttctcatttttagataaacattggtaataaaaatagtttattcttgtgtagcatgagctattaaacaatttacagtgctttatctgacaacttgccaacccatcttccaataacaataataataaatataatttttcattcatttaggttttcactactttgtaaatacacaccatagcaccatgatgctatgtgatacatactatatgataatatctgtagtccctgtttttaagatgtgaatgttctgattggggatataggaaatacagttacaaaatgaccacgtgactttcaagtgttaggaaagtctagttcagtgttcagtacgttgaagatagtaaatattttttaaatgtatgacatttatttaaaacttatctatccagttaatatgttttgttaccatgttaaagcaaggataaaaacaaatataggcaagataattataattatacttaactgtggctcagagaagctgacagacatgtccaaattttatttgcatgtgtgcagcaaaaccaaaatttgaactcctgtctgcttaacttcagagctcatccattcacttctactaagccatgtagaattacaaggcagaatgtgataattgctctagtggatcagaagaggtaaagatcgcttccagcagggaggaccaaagaagacatcattaagaaggagtagcatttgagcaagcctttgaagaatgggcacaggaacagaggaaaaactgcagacaggggttagcattggtgaaaccttatgactctggaaaatgagttgccaggcagatgaaggacaccactttgaatgaagtggatgccgtaaataacactactatttaaagaatcgccagacggacttcttagttattagaaatggaatgcaaaaatagacttatatttcaggtttcaaatgaaagtcagttaaactctctggacctcggtttctttgtttctaaagtgaggacttgaacctaaaaaccactgaagactcctcttaggaggtccattttgcaatactttcattttcattttttttcggaatataaaaatgttagtagtagtgaattcaatgtgtagtaattatataacctgtatatatgtaattcgtcttaaaacaaaaagtatacctatgtatttacatattcttttaaaacaaaaagtatacctatgtatttacatattcatatctctatatacaaacaagatatttgcatttgactggcttatataagctctcaacttcatttcaagaaggctttttttttggccgtgtatttatctctagtttgcttcttagtgtttgagtgcaaactgattcttataataatttagtcaatacataataagaaagtatacatgtactaagcaagtgataaagacaagatttggggattatgtgctctctcatgatatctgtatatttcaacctttggaggggatgtggagactgaaatattatatattaattcatcaatataatggcaaatttttgtgatgttcaaatgctcttgagtagattcacaaattccacttttctatcctgtaacccatgcagaagtcaaagtaagattttggcaatgtttatgaaatgaatgtgcgtgtgtgtgtatgtgtgtatacacttgaatgtatatatacatatacatatatgttcaagtatatcaaatacatatacatatatacattcaaatatatatgtatttgagacatatatatatcaaatcaatataatgtgtatgtgtgtacatgcttgcacatatatagacaatttgaggaaccataagaacgtaaaagattaatacaataatgcttatttttttcctgacttcaaagcatttttttccattagtactttttctctctaatttccctttccaaataagaaaagagaacccgaaaaacaggagtattttgtttgaattcatggtgagaagaaaaccaaacattgtttttttccataatttttgcaaaggtttctaagggattttagtggggacctcttccttgaatagaattgcccaggatggaattccatcctgccattgttgctgccaaacccattcaggggaacttgatgttgtgagagttccagactctttcattttccatcttacactgtctctcatgtcctaaaatagtatgttttggcaaaaactgatttggattccaatgtatttggaattgatctttggatttggattccaatatgtttggaatttattaggtttgttttaatgatttgaatgaaattgaacctcgttggtagcaaacaatgcagtgctttgatcatattaattctgaggctgatcttaagtagggatagtttaagctcattttggttaaatcagttcatggtcaaattaactaatcttcttaacaaatatttacagagcactaactatattcattagtgttgagtgttgttaagatgaacggaaatataaaaaggtttccaaccttcatggtttgtattttatgttgagaaataagattaaatctttgaaaagttaaccaatttaaggtcttacatacataaatactaaatgagtgttagagtgtacaagttctttggaaattcaaagacctggaatttgtgtgaaccctctgattttgttaactaggtagtaccagcaccgctttctaatgggagaaaagtctcaagatgaatttgccctcaggtacattctgagcagatggaagttgaaaagcaatgaaagtaaatgaaaaaattgaactattttcacttaataaagagaagataaaactggagcaatagggaaattgcggtaaattttactattacaacaagaaaatccttcccttcagaagacaccagtgcaacaatataggctgatcttaagttagaagcatttaatttcatataggcatttctgctgggaagactgggtataagtccattttcatgctgctgataaagacatacccgatactgacaatttacaaaagcatgaggtttaatagacttacaattccacatggctggggaggcctcacaatcatggcagaaggcaagaaggagcaagtcacatcttatatggatggtggcaggcaaagagagagcttgtacaggaaaactcctgtttttaaaaccatcagatctcatgagactcattcgctatcacgagaacagcacaggaaagacccaccccataattcaatcacctcccggttactcccgtaacaggtgggaattgtgggagttacaattcaagatgaaatttgggtggggacaaagccaaaccaaatcagccagaattacctttaaagaggatattgatttacttgaaataaaattaccaagtttatatcatgtaagaattaagagcaaatattcatttgtaatcctaaaaatcagtcacagaattgaatgcttatatttcaagaaaaatgaatattaataaatatcaagatagtaaaaaaatcttaagtccagaacttgaataaaatgttaacccaatgacccttaaatattccttttttttaaggtactatatataaaatataataaaaatgatctggttgagaaatattggtctggaaaattaagatagattaaaacttctttcccagcctctagttattgcaaagattcaccctgattgcctgaggaagaacattctctcacactatggctagaagagaagtgaaaggaaattaaaaataattacaaaatcaatcactaggaaagatttaattgtggacaaaataatgagaaaataacacaaattaatgattagaaggtaattggtgagttttaatgttttattgggctctggattctaaaccttttctaaaacctaagtcaattgaactggttgaagaacaaatgccttaagataaaaacaatttttatatttaaaacctaccattgatttcacaataaagtgccatatagcaggaatatgattagctaaacaaacatatattggctgaaaaaagttaattttgatcaaattttgatcattctgttgtcagtgtccatgctctgcatactcagccttcaaatgaaatgttgatcatctccaaaatttaggtaacaggacaccatctgatgtggtttgagtttgcattcccacctaaatcttatatttaattgtgatcctcagtgttggaggagggccctgctgggaggtgactgcatcgtgggggtagtttccaatggttcagcagcatccccctagtggctgctcatttagaagtgtgtggcacttccccatttactctgtctcttcctcctgcttcagtcacgtaggatgtgccagcttcttcttcatcttcctccatgattgtaagtttcctgaggcctccacagacaggcttcctgtacagcctgtggaatgctgagccaattgaacctcttttcttcataacttacccagtcttaggtagttctttatagcaatatgagcacggactaatacaccatctaacctatagaatgattcatttgtttcttcataggctacttggatctaggtgataatttggaatgctattcatctctgatttgaaaatgatttgggttgcttgtaattggtcatttcctaactcacttacttcctggttctcatgcacaaagccaagaaatatccatctatgtagtcagagtaattctttgggtcttagaatcagacttaaaaatcaatgagaatagacttatagatatttacaatcctatttgcaagtctccatcattttataggtaaaacctaaattcttccttttaaaatttcatatagttcctttttattctgttcttaatggagaatatattatatatgtttaagtaaatccgatgcttttcttttttccatcaaagaagtccaaaattcatcttttttgtctttgttgatttctgtttcccaagttctcagaatgcagcttaaatgaaaagcaccaagaaaggatgatttaacagcttagacaaatttgtatttaagagcagatgaatctgggaggggttggattccttagaacaggagttcttgtgggagtatttgtagggtgggtgaggtgctgcagcagaaataggatgaatattttcaagaagctgtccaaccctctcttcctgccctttatagccaaccaaaaagtgaaagattacttcctcaggtaatgtgctctgactccatagactaggccatgtctccccgttaaagcgctcacagctccctgtatgacatttctcaatgatgcctacattatgtttcattctcctttactgacagggaaagtattaattggtatgtgggttaaacacggtaaaaaataatgatgatagtgattacatttgtgaaaaatcttaaagcatattatggatcagcgaaacaccaatatattagaatctctctctttctctatttgtatctctagctctttaaatgattgtattataagcagttcaccctttctgtgattactagaaatacagcttccccttcaccaggaaggaaaatatgttctgctgcacagacacacacacacacacacacacacacacacacacacacacacacgcattttgccagtggattctcccacaaggacaagtgtagctgactacatttcagggaattacatggggagagtaagtgaggaagtgaaagaagggaagaggggacacgtagctgtgtgttcatctagacccacctaaagttccattttatcattcgaaaaaaaagggtgtggctaagagatgggcataattaataaactgttttagtcttttggccattttaaatgaaacaattcatgtaatatttaatattcttgttattgaaattatattactgtatgtttttatatagttcttacaattgtaatatgtttctaaatagcttgtgtaatattgactaaattcaattattttaagtccaccttttaaaaacatgctatttgttttgttttatcttggtgtaccactgatgttgtttggctctgtgttcccatccaaatctcatcttgtaactcccctaattcccacatgttgtgggaagaactcagtaggagatgactgaatcataggagtgggtctttcccgtgcttttcttgtgatagtcaatgggcttcaggacatctgatggctttaaacatgggagtttgcctgcacaagctctctttttgcttgccaccatccacataagctgtgacttgctcctctgtgccttccaccatgattgtgaggcttccccagtgatgtggagctgtgagttctccattaaacctctttcttttgtaaattgcccagtcttgggtatgtctttatcatcagcatgaaaatggactaatacagtaaactagtaccagtagagtggggagttgctgaaaagataccagaaaatgtggatgtgactttggaactaagtaacaggcaaaggttggaacagtttagagagatgagaagaagacaggaaaatgtaggaaagtttggaactcctagagacttgttgaatagctttgaccaaaatactgataatagtatggtcaatgaaatccaggctgaagtggtctcagatggagatgaggaatgtgttgggaactggaacaaaggtgacacttgttatgttgtagcgaagagactggcagcattttgcccctgccctagagatttgtggaactttgaacttgagagagatgatttagggtatctggcagaagaaatttctaagcagcaaaggattcaagaggtgactagagtgctattaaaggcaatcagttttataagggaagaagagcataaaactggaaaatttgaagcctgacaatgcgatggaaaagaaaatcccatgtttttgaggagaaattcaagttagctgcagaaatttgcataagtaatgaggacccaaatgttaatccccaagacaatggggaaaatatctccaaggcatgtcagaggtcttcatggcagcccctcccatcacaggcctggaggcctaggaggaaaaagtggtttcatgggtcttgcccagggtccctgtgctgtgtgcagcctagggactttatgccactctagctaaaatgggccaaggtacagctcaggctgttgcttcagctggtggaagccccaagccttggcagcttccatgtggttttgatcctgcgtgtgtggagaagtcaagaattgaggtttgggaacttccaccttgatttcagaagatgtatggaaatgcctggatgcccaggaagtttgctgcaagggcagggccctcatggagaatctctgctagggcagtgaggaagggaaatgtggggttggagcccccacacagagtccctactggggcactgcctaatggagctgtgagaagagggccaccatcctccagaccccagaatcgtagatccactgacagcttgcactgtgtgcctggaaaagccacagacactcaacaccagcttgtgaaagcagccaggagggaggctgtaccctgcaaagccacaggggcagagctctccaagactatgggaacctaggtcttgcatcagtgtgacatggatgtgagtcatggagtcaagggagatcattttggagctttaagatttgactaccatgctagattttggactcacatgggacccgtagcccctttattttggccaatttctcccatttggaacagctgtatttacccaaagcctgtacccccattgtatctaggaggtaaataacttccttttgattttacaggctcataggtggaagggacttgccttgtctcagatgagactttggactgtggacttttcagttaatgctgaatgagtagagagtttgggagactgtttggaaggcatgattggttttgaaatgtgaagatatgagatttgggaagggccaggggcagaatgatatagtttggttctgtgttcccacccaaatcttattttgtaactcccataattcccatgtgttacgggagggacctggtgggagatgattgaatcatggaggcaggtctttccaatgctgttcttgtgataatgaatgggtctcatgagatctaatggctttaaaaacaggagtttgcccgcacaacctctctttgcctgccaccatccatgtaagatatgacttgctccttgccttccaccatgagtgtgaggcttcccagtcacatggaactgtgagttctccattaaacctctttcctttgtaaattgcccagtcttgggcatgtctttatcagcagcatgaaaatggactaatacagccacccatttgacttttgcttaactgggaaacctggaaggttacaaactgaaattttagaaacagtagctgaaacctcgcagaggtgctcctaggatctctttcagtttcctaccagaaaagtgggaaattcataccaatctgttgcccaacttgtagctcttctagtccagatgaagaaaagtttcattcgtctgtggatgaagaaacttgaggaataattctatctacatcaagactttttttataataaattaagaatgggagctgtgattctgtgggtaagcaatccttgctcccatgcaggacactaatttttacctacatttgcacatcagagctgcctagagagcctttgtgaaatgcatgtgccctggacctaatcctggatgcttctgtaggcctggagaggggctgtgccatgtgcatttttacaggacttggaggtcatgctgatgtattttctggatcagtaacaacaaaccagggctttcttctcacagtcatgctgtaagacccactaatatttgaaggattcattgttggacaaaatgtccagagaccccattctctagaaaagtgacctgcttccctgtgagctttggatgtagattgacttagcttggcctgcctgtcttcatatttttacctatgattcagatgttaaaaaaaattaaagccctaaatttcttgcccatgtttaaataatatttcaaaggtaatttttataacataaaatatctccaacttctagttcaaaatattttgaaagattattgtttaagtaatacatattaacataccctgtatgcttctttgagaaataatttagagagtattttctaaaggcaataataagaaaaccaatagtcataaataaataaatagtaaacacataataatcataggcatacagcattttcatatctggtgtctaacccacttgactataggtaccttgaagctcataaatattttcattaacatatgatgtatcggctgcgtatttaaaatggcatagaaatgaactattttcaaattaatattttattcatacaaggaacagaccatagcctttcttttatttattccataaacatgagaaaaatgtttttcttcttgcttatatagacactgtattagaatacattctaatatatattatgtgtatatgtgtgtatgtatgtatgtaagatgctattgaaatgactcccatatctatgttcacctgaaaagctcttaattgtgaaacccaaggggcatatgtagtctttactttattggacttcttcgacgtgtttgacttggtctgccaccctgtttgaaattcccatggcttctgtgagtctctccactcttttccttctaatctttcatcattgctcctctctgtcttcttcaagggctgctttctcctatgaacgatttattatttatcattctgggattccttatcccctcattctgaatacaggttttagctgagcaaatcaattccgtcatttcaactcttgctagtatgctgctatttctcccaatttttgtctccaacaaaatgacttcgtacctgagccacatggccatttcctctaggtagctctactagtatatcttaaatctcaaagccatacctcagcattttcttcttcaagtttatggttactcttatgctggctctcctaggtgatgacttcagaatgagccaatttaccaagctgatatttaggagtcatctatgactcctccttaagcctcattacccatatctgactttttccaatatagcttcctaaatatttcttgaaaatttccctcctctccctgtgtatttccactgccttgtttaggactctcatcatctgccttctgagctactacaaaggcctcttatttttttctccattccaactcttgccttttctataatctatattaaagaaaaatcttggcatagtaattcaaacatacactgaaagtccaccatccctgtatggcaaaaatagcacatatagcatcaatgtcatgactccctatttttgtatctatgaaaaatattactaattaattaaaatattctattttgttgttttaatatttatttagaaagattctaaggaattctcaaaacagaagccacccaatcacatcatgtaagatttggcaaataagagtaaatgcatttgccatattgattaggataaaccccatagtgcagcactgtgtcatccatgatcttaccttggtccgattttcctgctttgtctccagccattccctgcatcatattctgtgaaacactttggtgacagcagtttcttgcttacaccatgctgtttcttctttccgggcttttacttatattgctccctttgtttggaggctttctccttacactcctacctttttgccaatgccaattccaattaatttttacctgtgtcgaaaagagtcagcccagttctcacccttttcttgagtccagccaaagattatgactctagtccatattcctgtaataatctatgcatatctctatcaattcctgttattgttcttagtatatctatacttagtcatttttccacttatgtgtttgtttagcctactgatagacactgagaaacacaattttattagtctagcaattttcagacaacttatatagtaactagcacatcagcaagcactgtataagatgagtcaattaactttgaaagtattgctgcacatgtaaaatatcagatttatttaggagaggtatttatttgtcttttcctaaagcacagttcacaaacttctatcatgcactcttcaggcaatccagtcttcccttaatccacataattaatttacattgctaggctgctgtgggaatttaagttttaaactcctgtgtaaagcatagaaatactaaatacattttctgatgaaaatgatgtgttttaaaaaataagaatagttaaagactgtagagaaaaccagctttttttgggaaattgttcccaaacacctaaattctgttttcttttgtcatgaattattactatatattatatattaaagccatgtatactttatatttattttccttcccaatgtttaaaaaacacatattcactgtatatactattgattcaccacagagatatgctttggttttatatggttgagaaatatctaataaaagtgtttcaaaattgtttatactgtaattcatactacttttctggtcttcttagtcataaaccaaagacatgattcgcagatttaaaagtagatataatatctctatatgggtcgagcatggtggctcatgcctttaatctcagcattttgagaggcagagttggtagatcacttgaacccaggagttcaagaccagcctgggcaacatggtaaaaacccatctctacaaaagaatacaaaaaaagtagccaggcatggtgccatgtgcctatagtcccagctacttgggaggctgaggtgggaggattgcttgaacccgtgaggttgaggttacagttagccgcaattgcaccactgcactccagtctgggtgcttgtgtggcagagcaagacaccattccaaaaaagaaaaggcagaaaaaaacaaaacaactctatatgtcctggagaaatttgctgttaaaatttattcttatatatcaatatgttttagagtccttaggttctaaaacttttttctcagttttcttgaattttactcatttggtttttataaacctaaacagaaataattatatgctggtaaaaggatttccgtattgtccgagtctcaattatcaatcaaggtgtgtatatgtgcatgttgtgtatgtgtgagtacacattgtttgaaagaaatgtaagaagaaagaagccaaaagaaaaagggctcagtgtcaaaatataaatgctctgtaatgtgatccaataatatgaaaatttgagcaggaacttatatgagcaggatcccatatttttcatgaaattttttgagaatcatgagacagcaatttgaaatatttgtacttgattccctgaaacatcagtaaatagcacaaagtagtcttctcttaggtgcctgaatataatttggtgactactagatttagaaggtgttgaaataaatttttttgccttaaaatacgaaatactgtgtgaactggtctactcatagagatgaatggaaagctccccagaagtataataaaaaattatgcggaaaagtagtcatgtggtaaacagaaatagtaccttgttatccttgtttcaggttagccagacacatgaatttcatctgtaggaaaatggagaaaaaatatctggccatgggtttgactgattcctgttcttattaagtatgtatcttcatgtgagagagaagagacaggaatcatttcttatatattacagcttaattcactcatccactagtgtttcctgagcactttacacatgccaggaataataaacacagaattgaccacttttgtagagcttatagtctagtggcagaagaggcagattattcagtacccacacaaacaaaagtaaaatttttactgtcacaattgctgagaagtgcacagtaaacagtgaataatcagggtggtggggaaggcctgtctaaggaggaaacactttggttgaaatctggaggatgggtggacgttaaccaggcaacaaaaggaaagacagctgtgcagtaactttattacggatacacactttcttagaaagttaaaagctacatatacaaagcacatatgctgacttcagaccgttgttggtatttgcgtgggatagaggggaaagggaatgcattgggtgaaactttggttgtagtaagacatttattcagcttgcagcttacattctggaaagtcagccagataaacattttatcatttagcaaatacgtaacatagacagcaataaacgatacaaaaaatagtaaagcagaataagaaaatgaaaggttaggagtgatgtcgttttagattgactgttaaaggaagtcctttctgagaagttacctgaatgaagtgagatagtaaataatgagctaggttcttttagctttttttaagagatagagaaaaagataatgaaagcgagcatggcaaaatggtaatacctattctagatttcatacttacagcctatttttttttattatttttgactcttctgagcttttgcattttgaagtatttaaaaagtaattttataatgcatatgtttgtgaccacttggggccacattcagcctagatgagcgattgaggagtaggctaggactttgtgtagttgtgtttggttgagtccgcctcagccgcctattaggatggataatattgctatagacagagggaagctggtgtctgttaggtcctgaaagaatccagttcggcattgacaggtaagagttacatgtgagaggaaactaaagaattgggtaggcagtaagccagcaggtccttgtagattgttaagaagttcagtctcttttctaggagcaatgggaagatgttgaatggtttttcttgcaggggtaaaagtgatatgattggttttgcattgaagaatttaacattttccattcattcaagaaattttaagcttgcagctaccatttgtcaggttctgttccaaatatgtggacatatatttgtaaaaaaccagataggcctttacactcagaaaactcgaagtgcaaaggtaggtgaagtttttgctgtcatctatggatgaacttactagctaaatattttgagatctccttataagctgctttgcaccttcaacaacccatataattatcacctttgacaaagattgggcaaccatcttcattctaatgactgagaattttgataactcactagtttgttcattgtgagaaaaatctttttgtgtgtgtgtaaagtggtttcttatattgttttgtctgtttcctattgtatctgcaatggttatgtgattcttttccaagtttaaggattctaatattttaaggtcaagaaggcctgggccaaggacagaagagccacatgagttgcatgttcattactaaagccgagccaaaaaacacagtccttcagagtgtcattcgagaactggaattttcagcacttgccaaaaagagcatttaaaattcaagtattagtgataggtatccttttaatattttggaggtagtctgtatcttctgtacaagaaacgtgttctaagtgattagttattattggggacttggaagaagtgataaagatccattctcaatgaggaaacatgagcatagttaatgccatccagtttaaaagattggcttagtaatttcctttgagcagttccctccgatatttcccattcatttgacttcattctcctggagttttgtcattttccacaaaacttaattgatctatctttagagacaaatgaggtccattgtttgccgtggagacaatgtggatggtagtcaaatttgattattgactctttctctttagttacatagaaaatgggactaccaggttactctagtatctcagtggtttatcggacctaagttggtagcaactaaaattttatgtaagtacttcaaattgctccctatatttattgtaaaacaaaagcagttatcttaatatacggctcttctaacattcagtttatcatataatgaaaaaagatgttagtgctcagaccgtagtatctatcaatgaattctgaaaaagaagaaaaaagccagtaagtatttatgcttttcttaattaccagtttgataactgcaggcagataaatcttcttcgtttttatagccaagtaattaaatgtttttacaacaaatctggcgtgccaaataaagacaaaattgtttttaaaatttaaaagaaatgttagttttcaagggataatatataaatttaggagtcaatttagagcttaatattcctttgagtttatctttcattttacattactaaatttctttttagttataaatattagtatttatattttaaaattatatatttatacaataatatagatgtttgcttttaagataaccatgggtgatagaaacaacaaatcatatatatctttgcaaatgccagaacattagcagaattgtaccaagttgaattatatcaagtctagcactggtagaattacattgaggacaactttatgtgttcccaaattagaattgattaagttggtttgtttgatttttttgtgtaaagtggtttcttatattgtaaaggaagagttaaatgagcttatgagagataaagagtgaaaatgctaattttagaaaatgcaagaacttgattttcaattcttttatttgttattacaaaggttcaaccccaagggaaaaacaggattgagtgtctcattcggagaggctttgcctcacttttctgtttgaaaatggcggagctggggaactgggcttgagagtgacagggacccaggtcaaaactctgctgttctcctttacaatctttgtcatgttaggaagttacttaattctcttaagtatctgtttccttatctataaaatggaaataatacttacaagttttaactagtatatgtaagtgtcgttaagtgtccaaaactcagtgaagcttattatgctatgaaacttttccagtcctttctctaatcactgtgtttattttactttttaaattttttattcttaattttatgactatatagtagctatacatatttatggggtacataagatactttgataaaggaatataatgcataataatcacattagggtaaatgaggtgtctatcgcctcaagaatttatcatttgtgttacaaacattccaattatattattttagttatttttaaaggtacaataaatctgtgttaactataatcacacaattatgctatcaactactagatcttattcattctaactatatttttgtacccatgaaccagccccatattccccatcactgtgggtttgtttttagatatttacctatagtatttgatcagatatttaatttaatattttaaatagagatgggatctcactatgctgcccaaactcatctcaaactcctgggctcaaacaatcttcccactgtggccttccaaagtgctgagattacaggtgtgagccaccgtgctcccccatcagatattttgcaatcaagcatgtgttaaaaattttgcaaagtgtctgttgttatccatttcacagaaagatcagatggtgacataaaggagaatctcaggtccaaatgtccaaaatagcagaagcaaggtgataattgatagcctttaggaagcattatgacctcgtattttgttcttttccttcgtaatcttcctagttcttctaaaaatgtgatcccaacccctcacttccatatttgcctgtattatttcttttcatagcacttcaccaccattgatggtacatatttatttatcaatttattacttttggtagtatataacgtctgtaaagcaagagtttgttattttgtatgtagtcttctcttaataaaaattattaattattttgtattttccatgatataatttgggataatttttagaaatgaaatatcatacattccattaattgcggtcaaaagaaaatgcatttaaagaggatatatgcatgtgtgtttttcaacaagtaaggttaaacttactttgtaacgtataaaataaacatagctaaaaactatactaaaagtgtgattttaaaactgtgatttaaaaatacagcacattttacttaaatggagatttttgttctagaaagatattgaacatgacaatctgacaatctgtccttgggacactgtcactgctattctcagatcagctgacgagacctcagctgggcctctgcaagttgcttaagaacacttctagaaccatcctaatgggcatgttccaactgtcacttggaaaaaaatgatcacttgagatcaatctgtacagcaggtcttctggcagaaaaccagtcatatcattctctccaaaagaggctttgtggggaaaaggccttatcacattccttggacatgaagttactgttggaaccatgctcgtctcaaaccattctatcaccatgccaaaaagctgcagcttctgaaaggtcagaaatggccttataatgacttagaccatcttatgattgttaggaagtgaagatagttataatactataaaagctttgggtcttttaccctttcatgagcagaaactgtgtgttattaactaaaccacaacttcctgatataaatatcagagagaccaaagctaggagactaatattaactctaatcctatcctggacttggattcagagtgtagaattgggttattcaaattgtagaatattaaagagaaaatggagtgcacaaaaggctaagaggaaaaaatatatatttcttatgaacaaaaattcacaattgttgcatatgcattgttaataatgtggggaaatttatattttttaattaagctttattttttaacctggtgtttattcttctgcattaattaaatagaagaatatatgttttgaattttaaaatatactgctagtaggcattacttgatttgaatcatgaagaggagctgggaggtgaatctcaaaactgaaaaattggagcatttcaataatcctcatttttaaagtggcaatgccaagctttgcagaaaatcaaaagaaagcatgtgctgtgataataaaattagactttactcataaatattatagtgcacatcttaattcctttatgcatctgtaaaataagtggacttatctagacaatcaaaaagtttttaactcagttaacctacgaatgataatatatttaaaaatactgttttaataaacatgttaactataatttcctatgtattcattataaagagtatgtttgttttgtgtcaaaggtgcatagtatagacattgtaatattgtttatttgctcctatgcacttttgtaaaaatgctaaggtctattttgtccctattcttcaactgtgagcaacttgctttccttgtagaatatcaacttcttatgaccgcttatcctgatgaaaaagctaaagctttttgtaatgaaagatagaatacagttgcacgatattttaaattcttttgattgttcaaacgttgattttctaaactaggagattgttaattttttaaataggacattgttttgaagatacttttggttgcatcttcataaacaattctctcttcagtgaaagagaaagggagcagagaacaagaagagagtttctaagtaatttatataacaaactagtaatttgatttatctctttgtccttcaactgtctgcaaaatcttgccttccacattctgctaatcttgtcttaaattggtagtcacttacaccatgtatgtcactttgaaacttgcaggtgtgtttattttccatcatctttattttggagatagtgaaaaagccaaaaatctcacctccaattaagaaaaatattcttctaatgcattctaatgcattatgtgttttatgttctcaagtactcttttttttttttttttttaatttttaagacagagtctctctctgttgcccaggctggagtgcagtggcgcgatctcggctcactgcaagctccgcctcctgggttcacgccattctcctgcctcagcctcccgagtagctgggactacaggcgcccgccaccacgcccttctcaagtattcttagcttgagatgatggattagaagaatagatttcagtgtttaagcacatttgcttgtgcaaagcataattgtgtccacctgcagtagtgtgtgtatgtgcataaatttatatatctataaaataagaatgctgaactatactcacatgactgttcatagaaaaatgtagacacactttgtgctttaccaattactgctatttcaaaaaacacatttctttataattcattctgtgactttattcctcttaaatatggttgggtcaagttacttaaactttggcacaaaaaatgtttgtctcagcattcttttttaatgatttaggcagaattgaaaaactcgagtcataagatccagtgaatacacctcattattaaataatgctgtttcttgttacagctactagctgctctagctgggtaccctggctcgaactctcaaatcatttaaagcctacattttaaaaacagttttaaatctaatctcttttttatatctgatatgacttttaagcttactacattcatcctctgacattctgcaagggaaacatgaattaatcattgagtttgtccaacaaggaaagatgcatcttactgatactgtgagcttccagtgtggtacacacaagctgtttctgagattatagcacaagcaaacattcccacagctattgtgttgctgtttgctcagttcccagtctcttagaattccaggttgtgatagtacagcagtggaatctatgcttatgtagtgttgattctgttattgtactcactgcaaacctagaggttactatctgttaatagcaaaacaaacttggccaagggttattatgatgtatcttctgaaagcatttaccagaaacagtttgttaattgttacaaaaattgtattttatttcatagtcacaaatgtttatatatttttaaaaatatgaaatgtagccagagagaaaataataattccgttattgcttataatttgacagatcaatttagaatgaggaagcatattttaaagagcaaatggtacattttctttgtctgaagtctgcctagaaaacagattttatgtgacggactactgggtggcttctttcatatccagctagtagtgttattgactgattttgccagctctgcagctcatgtgctttttaacttaatttttgttcccgctttctctcattgatttgtaagcagcttaagatcagaatgctgtcatctaattcattggtatctccctccaaggaatggagttttattttatgttaaaatttttttctgggtacagagtaggtgtgtatatttatgtggtacatgagatgttttgatataagcatgcaatgtgaaataagcacatcatcaagaatggagtatctatcaccttcattgagctgcaaacaatccaattacactattattttaaaatgttattcttcaatatagtcaccatgttgtgttatcaaatagtagctcttattcattctttctattttttaaaaaatgtttttacccattcaccatccccgcctctacccacaatcccccactaccacttcccagcttctggtacctatcctttctactctctctgtccatgacttcagtctttttgatttttagatccccaaaacaactgagaacatgggtgtttgtctttctgtgcctggattatttcacttaacgatctccagtaccatccatgttgttgcaaatgacaggatatcattcttttttatagctgaataatactccattgtgtatatgtatatgtaccacattatctttatccattcatctgttgatagacacttatgtcgttttcaactcttagctattgtaaatagtgctgcaacaaacataggtgtgcagatagctcttcaatattctcatttcctttcttttaggtatataaccagcaatgaaattgctggatcatgtagtagctcaatttttgttttttgaggaaactccaaactgttctccatagtggttgtacaaatttacattccacccaacagtgtacaaggattctcttttgtccacatcctcgcaagcatttgttactgcctgtattttggacataagccattttaactgaggtgagatgatatctcattatagttttgatttgcatttctctgatgatgagtaatgttgagcaccttttcgtatgctgctttgccatttgtatgtcttcttttgagaaatgtctcttcaaaacttgcccatcttttgactggattattattttttttcctagagttgtgtgagttccttatatattccagttattaattccttatcacatgggtagtttgaaaatattttctcccattctctgtggattgtctcttcactttgttgattgtattctttactgggcagaatcttttaaacttggtgtgatcccatttgtccatgtttgctttggttgcctgtgcttgtggagtattgctcaagaagtctttgcctagacccatgttgtagagctttcccccatgttttcttgtagtactttcacagtttgaggtcttagacttaagtcttcaatccattttgatttgatttgagagagacaggggtctagttttgtttttgcatatggatatccagttttcacagcactatttattgaagagactgtctttttcccagtgtatgttcttggcacctttgtaaaaaaaaaaaaaaaaaaatgagttcactgtaggtgcgtggatttgtgcctgagttttctattctgttccactgttctatgtgtctgtttttatgccagtaccatgctgcttttgttaccatagctctgtagtataatttgaggtcaggtaatgtgattcctccagttttattctttttgcttaggatagctttggctattctcggtcttttgtggttccatattagtatgaggattgatttttttctatttctttgaagaatgtcatgggaattttgatagggattacactgaatctatagatttctttgggtagaatggacattttaacaatattgattttccaatccttgaacatggatttgttttttcattttttttttgatgtactcttcaacttctttcatcaatttatagttttcgttatagagatcttttacttgtttggttaagttagttcctgcatatttaattttatatatgattatcataaatgggattttttaaatatttccttttcagattgttcactgttggtatatagaaatgctactggtttttatatggtgattttgtatcctgcaactttactgaatttatcagttctaatagttttggggggagtctttagatttttccagatataagatcttatcatctgcaaacaaggataattttacttatcctccttttcaatttggatgagctttatatctttctcttgtttgattgctgtagcgaggatttacagtgcaatgttgaataacagtgatggcaatggtcattcttatatattcccaatcttagaggaaaaattttcagtatttcctcattcagtatgatactagttatgggtctgtcatatgtggcttttgttatgttgaggtatatttcttctatgcccagtttttttagggtttttattatgaagggatgctgaattttatcaaatgctttttcagcatcaattgaaataatcacatggtttttatccttcatactcttgataggatgtatcacattgattggtttgcatatgttgaaccatccttgcatcccagggattaatgagtgatttttgtaatatattgttataatgattgatttttgtaatgtgttgttgaattctgtttgttagtattttattgagaattttttcatcaatattcatcagcaatattggcttgtggttttctatttttgatgtgtctttgtctggttttcatatcaggataataccaccctcatacaatgtgtttggaagtattttctttgcttttattttttaaaatagtttgagtaagattggtataagttcttttttttaatttcaataggtttttggggaacagatagtgtttggttacattattaagttctttagtggtgattttttgatgcatccaacacccaagcagtgtaccatgtacccagtgtgtagtcttttatccttcatccttctcctaccattttccccaagttgccaaagtccattgtatcattcttatgcctttgcatccttatagctttgcatcccacttatgagtgagaacatacaatgtttggatttccattcctgaaatatttcgcttagaataatggtctccaattccctgtgaatgccattatttcattcttttttaatggctgagtagtattcaatggtgtgtgtatatatatatataaattgtggtatatatatacacaccacaattttttaatccattggtcgattaatgggcatttgtgctggttccaatttttgcaactgcaatttgtgctacgataaacttgtgtgtgcaaatatctttttcctgtaatcactacttttctgctgagtagatacccaatatgggattactgaatcaaatggtagttctactttagttctttaaggaatctccacactgttttccatagtggttgtactagttttcattttcatcagcagtgtaaaagtgctccctttccaccacattcatgccaacatctatttttttttattttttgattctgtgaagaatgatggtgttattttgaaggaaattgcgttaaatttgtagactgcttttgattctggccattcttgcaggagtgagatggtatcgcattgtgatttggatttgcatttccctgatcattagtgatgttgagcattttttcatatgtttgttggccatttgtatatcttctattgagaattgtctatttatgtccttagttcactttttaatgagattgtttgttttcttcttgctgatttgtttgagttccttgtagattctggatattagtcctgtgctggatgtatagcttgcaaagatgttctcgcactctgtggtttgtctgtttactctgccggatgtttctttgctatgcagaagcattttagtttaattaagttccatctatttttctttgtttttgctgcatttgcttttgggttcttggtcatgaagtgtttgcttaaaccaatatctagaagggtttttccaatgttaacttatagaatctttatggtttcagttcttagatttaagtccttgatctatcttgtgtttattgttgtacgaagtgagaaatgaggattcagtttcattcttctacaagtggcttgctaataattatcacagcatcatttctcaaatagagtgtcttttccatactttgtgtttttgtttgctttgtgaaaaatcagttggctgcaagtatttggctttatttctgggttctcttttctgttacattggtctatgtgcctatttttataccagtagcatgctgttttggtgactatggccttatagtatagtttgaagtcaggtaatgtgctatgccttcagatttgttatttttgcttagtcttgctttggctatgtgggctctattttggttccatatgaattttaagatttgtttttatagttctgtaaagaatgttggtgttattttgatgggaattgcattgaatttgtagagctttgggcagtgttgccattttcacaatattgattctaccaatgcatgagcatgggatgtgtttccctttatttgtgttgtctgtgaattcatccagcagtgttttgtagttttccttgtagaggtctttcacctctttggttaggtatactactaagtattttattttattttattttattttattttattttattttattttattttattttattttatttcatttcatttcattttatttgcagctatggtaaaaggtgttatttcttatttatttatttatttatttatttttttgagacagagtctcgctctgtcacccaggctggagtgcagtggtgcgatctcggctcactgcaagctccgcctcccgggttcacgccattctcttgcctcagcgtcccgagtagctgcgactacaggtgcccaccaccatgcctggctaattttttgtatttttagtagagatggggtttcaccatgttagccaggatggtcttatctcctgacctcatgatccacccaccttggcctcccaaggtgctgggattacaggcgtgagccactgcgcctggccaggggttgagttattgatttgattctcagcttggtcgattttggtgtatagaagagctactgatttgtgtacattaattttgtatctggagactttgctgaattctttcatcagttctaggaactttctggaggagtctttagggttttataggtaaacaattatatgatcagcaaacagtgacagtttgacttcctctttactgatttggatgccctttatttctttctcttgtctgattgctctggctaggactttcagtacgatgttgaagaggagtggtgagagtgggcatctttgtcttgtttcaattctcagagggaattctttcaactttcccccatgcagtattatgttggctgtgggtttgttacacatggcttttattacattatatgccagttttgctgagagtcttaatcataaaggatgttgggttttgtcaagtgctttttctgcatctattgagatgatcatgtgatttttgtttttaattctgtttatgtggtgtatcacatttactgacttgtgtatgttaaatcattcctgcattcctgatttgaaactcacttaattgtggtggattatctttttgaaatgttgttggatttggttagctagtattgtgttaatgattttaacatctatgttcatcagggacattgttctgtagttttcttttttggttatgtcctttcctggttttcgtatttgggtgatataggcttcatatgaatagaataatttagagaggattccctctttctgtatcttgtggaatagtgtcaatagatagtaccagttcttctttgaaagtctgatgtaattcagctgtgaatccaacaggtcctagacttttcttttgttgtcggcaatttttttttttttagcaccatttcaatcttgctgcttgttattggtctgttcagagtttctatttcttcctggtttaatcttggagggttgtatatttccaggaatgtacccatctcctttaggttttctagtttatgcatttaaaggtgttcatggtagccttgcatgatcttttgtatttctgtggtattggttgtaatatctcctgtttcatttctaattgagcttattttggatcttccctcttcttttcttggttaatctcactaatggtctatcaattttatttatatttttaaataaccagctttttgtttcatttattttttgtgattttttttgtttcagttttatttagttctgctctgatttttgctatttcttttcttctgctgggtttggttttggtttgttcttgtttctctagtttttcaaggtataaccttagattgtctatttgtgctctttcagacttattgatgtaggtatttaaagctgtgaactttcctcttagcactgcctttgccatatctcagaggttttgatatgttgtgtcactattattcaattcaaagaatttttaaatttaaatttccatcttgattttattgttgacccagtgatcattcaggagcaggttatttaatctccatgtatttccatggttttaaggtttccttctggagttgatttccaattttattccactgtggtctgagagcacctgatataatttcagttttcttaaatgtattgagacttgttttgtctcaattattatatggtctatcttggcgaatgttccatgcactgataaatagagtgtacattctgcagttgttgggtagaatgttctgtaaatttctgttaagtccgtttgttgtagagtatagttcaaatccattgtgtcttttttgactttctgtcttgatggcctgtctagtactgtcagtggagtattgaagtccctcactattgttgtgttgctgcctatctcatttcttaggtctagtagtagttttataaatttgggagccccagtgttaggtgcgtgtatatgtatatgctaggtgtgtgtgtgtgtatatatatgttatatatatgttatatatgttatatattatatatatgttatatatatgttatatatatgttttatatatatatgttaggtgcatatatgtatatatatgtgtatatatacaggattgtgatattttcctgttgcactagttctcttatcattatataatgtccctctttttctttttaattgctgttgctttaaagtttgttttgtctgatataagttttataaatttgggagccccaatgttaggtgcgtgcatatatatatatatatatatatatatatatatatatatatatatgttaggtgcacatatatatatatgtaatatatatatgttttatatatatatgttatatatgttatatatatgttttatatatatgttatatatatgttttatatatgtgttatatatatgttttatatatgtgttatatatatgttttatatatatatgttaggtgtgtatatgtatacgtatatatgtatacatatacgtatatatacatatatatacacatatatataggattgtgatattttcctgttacactagtcctcttatcattatataatgtccttctttgtctttttaattgctattgctttaaagtttgttttgtctgatgtaagaatagctattcctgcttgtttttggtgtccacttgcatagaataactttttccacccctctacctaaagtttatgtgagtccttatgcattaggtgagtctcttgaagacagcacatacttagttggtgaattcttatccattctgtgattttgtgtcttttaagtggagcatttatgtcatttacactcaatgttagtattgagatgtgaggtacttttctttccatcatgctaattcttgcctgaatcctttgttttttcaactgtgtttttgtttcataggtcctgtgagatttatgttttaaggaggttctattttggtgtatttcaaggattcgtttcaagatttagagctccttttaacagttcttgtagtgctggctggcttggtactgtcaaattctctcagcaattgtttgaaaaagactattttttcttcctttatgaagcttagttttgctagatacaaaattcttggctgataattgttttgttttaggaggctgaagatggggctccaatcccttctagcttgtagggtttcttctcagaaaccctcttagatattggtcttaaagccttgcccttgtgagggtattttccagattctgtatgcatgctttattgttttctattcttttatcttttgtctcctctgactgtatttttaagtagcctgttcttcacactcacaaatttgttcttcttcttgatctattctgctattaatggactcatgcattcttcattatgccaaatgcatttttcagctcaagaatttatgcttctttttggttattttgatctctttgttaaatttttctgatataattttgaattgcttctctgtgttatcgtgaatttctttgagtttactcaacacagctattttgaattctctgtctgaaaggtcacatatgtctgtttctccaggattggtccctggtgccttatttagttcacctggtgacatcatgttttcctggatggtactgaagctagtagatgttcttcagtgcctgggcgttgaagagtcaggtatttattgtagtcttcagtgtctaggcttatttgtagctgtccagaattcttggggaggcttaccagatatttgaaagaacttgggtgttatgacctaaggcgtttctggtatagggagcatcccaagcccagtaactctgtggtgcttgcagactcacagaggtaccaacttgatggtcttggacaagatccgggagaattttctggattaccaggcaaaaactcttgttctctttccgtgctttctcccaaacatacagtctctctctctgttctgagccacctaaaactgggaatggagtgacacaagcacccctgtggccaccaccactgtgactgcactgagtcagatgtgaagacagcacaccgctaggtcttgcacgggcctgctgtaaccattccctggctactgcctatgttcactcaaggccccacaatcagcgggtggcaaaggcagccaagaatggtcaaggaaaggagttttaaatgaggtggatacagtaaatgttgatgacatagattattcaggcagaaatatgatgtttcatcaagcggatggaacttatcaagaagaaaatacataattctacttcctttacttctttccaatcttggaaattatgaagggttaaaaaacttaatgttgtgaaatgggtatgaggaagagagatggaaattttacccttagttctgccgtgaactagtgatgtgacgttgctttgcttctctgtaaagtgaggaagttgaaccagttgatttttaaattaccttctagttataagactaatgctgttttaatgaagggcatcataatttttaataataattctctacaccagataatagtctgttacatttctagaatgtaaaacttgggccacttaagctgaaaccttatgatcatgtccacataatggatttcaatctcagcacctatttttttaataatttaaaaagatgttattaaatctaaaagtcttagttttgtcattttgttattttttagctgttattttgttttattgtagcaatatggagtgatttttcttttttctttttacctttaccaactgtcaatttaaacattactaaattgactaatcgttttgaataacaatgagtcttttttttttttttttaaattttgagatggagtcttgctctgtcacccatgctggagtgcagtggcatgatctcaactcactgccacctctgcctcctgggctcaagtgatcctcccacttcagtctcctgagtagctgaggtgccaccaccatgcctggctaatttttgtatttttgatagagatggggtttcaccatgttgcccaggctggccttgagctccggagctcaagcaatcaacctgcctcagcctctcaacatgctgggattacaagcatgagccaccacgccccaccaagagttttaatcattacattcatgctctacagagcacaaacatgctcatgcttttattctaatgctcatgtgccctttgtcactatcagtgttgccagtctcatgtatgtatgagaaggaacagagaatgccttgccacagtgtatcgttaccaaatacaccactaacactcactgtgtataataatgttaaagcagttagctatttttttaaattctctatttcatctattttctgtttcttttccaggacatccataaaaattcatcagagagcattttactactgagctgcaaaggtaggaaaaataaattttttttggttagaaaatatacttctttcatctgcgtttcaataatttattccccttgttagatatacatggaattgatattgcttattctgactaagtgaaaagtgttatttctacttactgctcaattagaaacatgtagtgtttaattgtcagtttgaatttttctttcatactattacagtttatattttactataggcagaatttcctctttatcctaaattttgatattctccataatttcatcgtgccttgacattgctgtatataatttctatacatcaggaaggcaattctgtgtgcatgtgtgtgtgtatatatatagttagaagttagaaactgaaactcttttttgtctaccatcatttcatatttttcttgctatttcaaacctataatttttaaagaaacgactaacgtaatcattcatagaatatgctgtcagtaacttaacaatataaatgttaacatggaggcatttagttcagcatttgctttacttaatagagtgcagaaaatgtggcccttttctcagttagggtgtatgtgaagataaatttagaatttctagactagtaaatacttctctgataataacttaattatagctatttcaaaccaaattgtttaattgtggtgaatcatatgtaaattgttcagatgtaggtcaacacccacgcccacattctagcacctctttcctaattcaagacaactttgcagtgcctaaaagagctgaacagtgcagattagagacataagacaaaaaaaaaaaaaaaacacaaaacaatggtaacataaaaaccaaccgtgtcagaatggtaacacaaaaaccaaccaggagtcagaaagtctctgtaataatgaataggcaggttgtatttatttagactttgcttgattatttcttaggctttatatgtttgtagataacagtttcctcactgctcacgagatttgtggcaagcaaactcatggtgcttctaggatattaaattttctcatctgtaaagtacatgcaatagcatcattattgtctactcattgaactgaaataaggattaaacaaatcaaggactgtaaaatgaacgtgtgactcctcaaatcccatacgggaagaacatgctgtttttcttgatctggttgagtcaaagatcactgatggcaagaatgccttctgtagctgcaggtgaggacaactgagatacggtgcaattgcagaaagtaaataaactttttattttttgagctgttacattatagttctaatctatggatgcctttgtgatgcagcattgtatcattttctgatgaatggctaaggttttatgattctattttatctttatatattgtctgctgtattttcaaatattttatttccatttatagatgcattgaaaaatcataaagcacattgcataaatgtgttacatttgtttttgcttatttgtttatttgagacggagtcttgctctgtcactcaagctggattgcagtggcgcaatctcagctcactgcaacctccgtctcccaggttcgagcaattctcctgcctcagcctcccgagtagctgggattacaggcacccgccaccatgtctgactaattgttgtatttttagtagagacagggtttcaccatgttggccaagctggtctcgaactccttaccttgtgatttgggaggcctacctcagcctcccaagtactgggattacaggcgtgagccagcatgcccagcctgttgttgcttatctttaggtgattattgctgatgtttttggtatattgacagaaaatagtcttgctgcttgttgatgtatactactttttggctttaatgataataaaattataattttgccttaatataaacttaatttttattgtcacttatcacgagaatttgttcaaggatttgaacttatatctgcatataatttatgatttttgacattttctaaaaattaattatcgaaaaaagtggcaattgtttattttaattcttagaggggtaaaataaatggtgtatcctttgcgcttctttcaatatgagtatctttgttgttttaattatttaagataaaaaaataagaattacactaaacataaaatgatatatccctcaaagttagctactacaaaagttttcgtatttattctttcagattctttctttatatacagaaacatcaatatcaatatgagcatataatgtttccatatcatatatatgatcctctggatttttttttggtgtttaccattttaattatgggcattcttctaagtctatgtatgttctctatttcatcgtttgtaatggctgcacattagtcaatattttggatgtatcatgatttatttaataggtcctctaagcttttgtttaaaaaatagaactttaaaatagaataaaaagaggcctctcttaattacaggtttggcaggcatacaaaagaataattctcacttgtatactgaatcaagaaattaaggagtaaagaaaaagtgttacagtaaagagtcattgaaaatagtattgagtaagtgtgtattagtgggctgggtaaaggaaagctaataatatagatattcatgcaagtgtgttgtaggtgtgtaaaatggaacagctacccatttcttcagagtttatctcaaatggcacctccttccataagcactcagagacttttcccttcattcccactctcaccagttgtcttacatcgctataaaaattcagggaaaaatagaccttttcatgttatgtcccatgtacaaattcattttgtatgcatctttttttttcctcactaggctgttaacccctagagggtaatgactgtgtgttattcatctttgaacctaatagatgcagaaaaaaatattcattcaattaaattggaacaaagtgtaagaaaagaaagtaatcggcagggcacagtggctcacacctgtaatcctagtactttggaaatccaaagtgggtggatcacctgaggtcaggagtgtgagaccagcctggccaacatggtgaaaccctgtctctactgaaaatacaaaaaattagccaggagtggcagctcacacctgtaatcccagctacttgggaggctgaggcaggagaatcgcttgaacccgggaggtggaggttacagtgagccaagatcgcaccactgcactccagcccgggcatcagagcaagactctgtttcaaaaaaaaagaaaagtaatcaagtagaactgttaaatcttacacagattttataagatgccactatatgccttgctattatgcctggagtaaattataatcaattctcctgatggatgagacacaaataatataaacacatgggtttgatatataatggaaattattttaaattgaattttagtgattttttgtggtatttatgttcaaaaagcataccgacaagtcaagcatttcagaaaaatgtttataaatgtatgaaaaagttgtttgtgtggtgctgaacttggatatatattactgcatatcaatgtgaaaacattgtgtcagcttcaaagcattgtgcatatggaagacattattgctattgttaatactgtaatagaattgcctctgcggattaaaaatgtagatgtttatgtacaaaatagcagcaataagtaaaagaagaaattatttatatggattctattaaataaaaagggagtactgttttcagtactttgtgtaatgcagattgctactcatgccatttaaatctctgacattgtcttaccatttgaatcatgcttgaaagaacctgtgtccacttagtctgatttcactggtaaaataaattaggaaaaaaaacaaaaacaaaaacgaaacagtgaacagatgtaacgattgcaatttaatttaaagaaaaattagaaaatagtggaagtaaaatatccctttgaaacagaatgtaatgcctagtgagttctttttcttatctcacttgcaaaagtcactagctccaactctgatttcacatgcctattactgagcaggtcaataagtcattgggaagaaggcgagtatcttggtcagtcttttctaatttatttattttttttaggctgttgctgagctttgtaaacccagaggctgaaacttagtgtttcaaatgcatatcttagcaatgcttttttgttttgtttttttaaaacaacaacaacaacaacaaaagctctgatctcctcattgttttctattttgctagggatacaaatataagtacctctagcccctatggcatgcaaaaaaatgagtgtaacaacaaatatcagataatagaaaatggtgggtactgaggaacaggtgatcgtatggttaacatctgtgctataagggctacttctagaatactataatgaacattctagtcaaatgttctgacaaattgtgtgttccagtggctaccacttctgaagatttaggaagttgagtatcggaatttttatgtaaaatttcatgattttgaatgttggctcaaagatagaaaggaaaaaagaaagaaaaggaaggaaggaaggaaggaagaaaggaaagaaggtaggtcggtcaaggactagggactaaattatgccccctgccttgcaattcatatgttaaagccctaacccccaatgtgatagcatttggaggtggggcctacgtgagataattaggtttagataaaattatgagggatgttcatgattagattatggtccttataaaaagagatacaagagggcttgtttcctttctcttgtttcccacgtgagggtggagcaagaaagccattgttagcaggccgggagaatgctcgctggggtatctcattggccaatatcttgatcttggactttccaacttccaaaactgaaagaaaaaaaaaatactgttgcttaagccacctaagctatggcattgtgttatggaagtccagcctgcctggaaatagcaatgactaccatctaatccttagattccattcgagttttatgggctgtccaagtgaattccgatgactgtcctttaaggtgtaagaacttgtttctgagtgatgtgcgctgtttagtagtcatgttttattagtttctgtcagtgtaggaaagtgccacagacttttcttgagtttcttgaccctgacacttttgaagattacatgccagctgttctgcagaatgaatttaatttgggtttaattcagggatcaggttttatgccaatttggatcctagtgtctgggacagtgtctggcatagagattgtgtttcataactaattgaggaatggattatgattgaaaatatctattgtgcacctctgaatcaccaggctaatgctaagtatttcaaaactttctaaataaaaaaaatgtcaaaaatagaaaacacacaagtctaaaatcagaaaagaaaccctcaaaaacacagactctggtgtcttctcctagcagcactgggatctgttctttaatgtatatagtgagcaggcaggtgctagccactgtgtaagtgaatactagtttctttagagcagggcttctgaaagtgtggtttgtggtctgcttccaggtcacaagttgtttcagattcatgatgacataagaagagaaattggaaatgagaatttagaaatctttgagcattttgacaaaataattttgtttttgctatctaataattccaaaaccatctcacattttatctgtatttttattacactaagctgattattaatttacattgtatttttccattgtattgatccataattgagtggaaattttaaaatgtaattatttaccacagttggtggccattcttcattgctttagggggattaaagtagagtggtgtaaatgtgatctagaccatggtgggatttgacatagaccccaaagaatggataaaatccacctagaacataaagtatagagctcgacaatttatgcacaataaaatgttagaatatatgtgtatgcatatatgtgtgcatgtgtgtacttgtatgcctgtttgtatgtgtgaactttcttttatgcactgttatctgtgcacatgtactcttgtgtatgtgcacatatatcatacatgtgggtgcacatgggtgcgcatatatatgtttgcatgggcatgtgtgtgtatttgggaatgtgcatgatatgttcatagaactgggtaatcatgatcttgactagttttttagctgtccagttttggacattaaatttgaggtgcctgtagaagaagagagagggggccgggcacagtggttcacacctgtaaagccagcactttgggaggccaaggtgggtggatcacgaggtcaggagtttgtgaccagcctgaccaacatggtgaaaccccatctctactaaaaatacaaaaattagcctggcgtggtggcacatgcctgtagtcctggctactccggaggctgaggcgggacaatcgcttgaaccctggaggcgaaggttgcagtgaaccaagatcacgccattgcacttgcactccagcctgggcaacagagcaagactccatcaaaaaaaaaaaaaaaaggagtgagagaaggtcaaactggagaaatgtatgtatgtacttttgtatgtatgcatacgtaatatacagcttatgcatatatctcaagagctctgtgtgccagttctgcctgtgcagaatcatatggaggctttactttctcatttgttgctgtcacattaatttattgcgtgaacatatcatttgaaactccagtaatttgtcccatatttcaaaatgtagtatggacagagaagaatgacatagcttaaaactggttccagacgtgtaaaaacatcttgtgtctctactaccaaagcaaggaggaaaattgtgccgattaaatgcctgaacctgttttggtttcaattacctggattattgaggcagaaacaatctttgtgcctgatatatgcttataattgccttagtcttcagctttgacttgctttgggaacatgcgcatgttctattaataccattgttagaaaggagaatttatttccttttttgatggttccataaaagctttaaaatatattttacaattcagagaactaacattttataaagcctccataatggagaatagtatacggagcaaagggaaaagagttaactagtattcacttcacagtcatcatgtgatagttgagttacctcttactcctttttcacaacaaacgttagtgattcaatcttatctgtagtgacctttgagcaccttctgatttaagacatccacggaaaccaaacacactcttgaattctccatatattagggtcagtattgtgaagatcaagcctccattcaattcaagcactttcgagtgaagctcaaaatgaattagaatccataggaagagaagactcacctctctatcccccaaccacaacctcagcttttctatttagcacccaaaacctaaggacttcaactaaatggagatttttcagcacagacattattatacacttcatccataatacctacttagtatttttatttcaactcagttaatgaaaaagccagaatagtaaggtagtgcatgagtaaataatgaccatctcaaaatacctttttggaccttttttctatgaaagaagtagacaaaatttatgtaatgacactccttttccctgcacagtcagtaaaatagatgtcaagttttagtggtcagcatcacttaaatatctaaaatgtatagaatccaacatatataaacctaaattgagcaccttaaaaatcaaaaatatttaacattcctatttcataaaacatgtaggtagtctccaccatttattttgatctactaaagtgtctattaatttatgagttaaatcaaaaagcattgagcatagactacatattaggcactttagcaggctctgaagactcagtaggtataagttatattatctgtcctagagggaagtgcattattcctaacctggagtgaaagcttcaggtgtagcctctcagagaagggaatgtaaaggaaaagatttcaaaagtcaggcatttggtccaaatggataagggagctccgagcatcataacaaataataatggcacttgagaaatagcaatacgatgtgtttgaaatgtagagggcaggaggaggagggacaagataagtaggaacatgccagatcacaagagctttacatgcaataacaactttgaactaaaatttaaagacagcaaggaacaaatgaatacatttaagaatgagcatgaattgatcaaatttacattttagactgatatctggaagtgtgtgcaattgtgatagctgtgtaagttgatcaagcaagaaagataaaggaagaagagcatggtcaaagaagagaagagtgagaagatagagttgagtaggttagccaagaaatgtattttaaatatcaaattgacagtactttaccattcatgtgtggtaggttagcacagctgtaaatcttaaaactcccaaaggtttgcaagaaaaactgggtagatgaaggtgccaataaattactacaaagaacagatttgggggatagatgattagttcaattatgaacatattgagaggttggtgtgtctagggtatattcaattagttatttaagtagattgttctgaatagacaaatctggtttctttcttagagaaacttagactgtaatcattataatgatatagatggaagttaattcattgatgtaagtggattaattcagcagtatgtatatggcaggaaatgaacagagcttgaaacctggtaagccagtaaattacataaaattacaaattcaggaccaatgtgacaaaagtctcaaccataatcttaatgtcttcgaatgttaatgtgggatgatttctttaatagatgccttgtatttttaaagacaaaaatgcaacatctaggaaaaatattttttaaataaatggacgagtacccaaatcttgatctttgtcgtatttctgcaaatcttatttttcttaaatccacttttattttgacttgcaaattttcaaatcagtactgttcaaatatgagtttaaacatgaaaacatgattaaaattttctcagcactcaggatatcactccttcctaccagatttttttgtttttttataattttatagcactcaacttgcttgaagaacagccttctcaaagtgtgcagttttcagtgatctaacccggatacagcaatgttttcctgcattagctcatcggaaagaatgccaatgatataaaaataaattggagcaaaaataagttaaatatttgaccttaataacatattgctcaactcttattatgtttatgtcaccttcatatgaattatcataattgacaaataagaatgattttattttctatgctgtaaaacaaagttacagtaaggttaaataaccacagaaagaaatgcactctgagaaggtatttttttctttgagaattctacaggttttaggcagttattacatcatagaaaatatactttaggccaatattttatttaagctattgttagacttttgattagatctgtaagcattagtgaggtctctttggggtcaatattagtaaaggaaaatggagttgagtgtaacaaagatgaatcaatttcattgtctagaagtcttttaggattcattatcacttggattttattatagttcatcatcattgccatattatgcaagcaaatcaatgaacttttaacaaaaccggagataaaaacctaattacttaatttgataatagttattttctaatttatactgccaaaaaatttatatcatattttattacagaattgtcattttaaaatacatatgttgagtcatgtccaagtcataaagaaacatataaagcctctgtcttttataagtcatttttatagtcacattcaaaaactgaatttttaaaaattttacaatacaaacaaaataatatattttgagataatttgaagatcagtcataactcatgagcacatgggattggtagatcttttattaacctaaatccttacctcattccccttcaagtcctatcccccttctccctttaaggaagtattttcttgaccaaacagaacaatagctctgacgtgtgtatggccaacaaatatcaagagcatttgaacgctttcaaaagacaattaaatatgtttgttggccatttgtatatcttttgtgaattgcctattcatgtccttggcccactttttgatgggattgtttggtatttttcttgctaatttgtttgagttccatgtagattctggatattagtcctttgtcggatgtgtagattgtgaagattttctcccactctgtaagtctgtaggttatctgtttactctgctgactgttccttttgctgtgcagaagctctttagtttaattaagtcccacctatttatctttgtttttgttacatttgtatttgggttcttggtcatgaggtgtttgcctaagccaatgtctagaagggttttctgatgttatcttctagaatttttatagtttcaggtcttagatttaagtctttgatccatcttgagttgatttttgtttgaggtgagagatgatgatccagtttcattctcctacatgtgactagccaattatcccagaaccatttgttgaatagggtgtcccttccccactttatgtttttgcttgctttctcaaagatcagttggctataagtatacaaatgccaataaacatatgaaaaaaatgctcaacgtcactaatgagcagggaaatgcaaatcaaaaccacaatgcaataccaccttactcttccaagattgccagaatcaagaagtaatggatgttggcatggatgtggtgaaaaggaaacactgctacactgctagtgggaatgtaaactagtacaaccactatggaaaacagtgtggagattccttaaagagctaaaagtagaactaccatttgatccggtaatcccactactgggtatctacccagaggaaaagaagtcattatacgaaaaagatacttgcacaaacatgtttctagcagcacaacttgcaattccaaaaatatgaaaccagactaaattcccattaatcaatgaatagataaagaaattgtgatatatgtatggaatactactcagccataaaatggaacaaatcaatggcattcatagcaacctggatggaactggagactattattctaagtgaagtaactcagaaatgaaaaccaaacatcttatgttctcactctgaagtaggagctaagctatgagaatgcacaggcatgagaacgatacaatggactttggggactaagtagaaaagggtgggagggggacaagggataaaagactacaaattgagttcagtgtctattgcccaggtgatgggtgcaccaaaatctcagaaatcgccacttactcatgtaatcaagaagttactcatgtaaccaaatacaaactgttccccaaaaacctatgggaaaaaaaatttttaaaagtaacacaattaaagaaaaaacttttctaaaggaggaaattctcttctgcaagaaatttgactttatttttattaaatctcaacataatttttatttcaggttcccgtttgtcctcaaggtagtaaaaaccagccacagtcaattcaggctttctccttattttgcctgatgtctagtctaagttctggtaggggacctcaggtccattcagtcatctgtctactcagttattcaccaaggattccatgattccatcatctggttcttagtcactaattcatgattgtcatttctgagaggcttctttctcccattcctatggccgtcccaggcctacaactctcttcatgtcagtgcaagactccgtctcaaaaaaccaatcaaccaaccaaccaaacaaacaaaaactctctgatgctgttttgggctttacatacacatgcaacatgcccatatttaagttaaaggaggagattaaacaaaaattatctccctcctcttcttctaaactatcagatgttgttttcaggaggacagggcaggggtcaagagaaggtggaacagtatagttgtttgaatgaatacttaacaattatgtcatttaagacgtatttttcacgagtttcttgatgcaatatataattaagataagtgtttgcttgttttaatattgctttgatctacttttagcaagagacttttatcatatttttatggaatatgtctttaatttagtatcgaaacataaatcactccttaaattcaattactaacatataattccagctaagaatttcaggagcaaaaaaaaagtttgtatttttaatgtcaagaacacattaaaatataaatgcttttgatatcttagatttaaaataaggaatttgtgtattcatgaaaaagataaaaatttccgagaagactttgacaataagttacatgaagaaaagtaaatgttctctttaaaaattagatctttccttacatccaaatgaatcagctatctaatgtttttggttttttgtttttctatttgtgtactctacttatattattatgagaaatttgtgagatttccaaatttacctctctccaatattggaaattctcataatgtttaatgtctgctaattagatgagtatttaaagtgtgtaatttgtcattttaaactaggtttctgtcatttatgctaattaatggtaaattttaaacatgttttacaccattttctgtgatggttttctagcctcccgtctttccacttactgcctctaatccactacttccacaaagctctccttacagcacactctgactgcattgtgcagagaatatcaatgattcccagttattcacaaaacaaattcgaaatgcatggtccagatgacctgttctttacagcccagtcccaatgtcctttcttgtcacttaatttctcaactcttcctcccatgccttataactgtgtcaagctggtataattttcagtccctttccctataactttatttttcccattttactaattgaaatcctacctatggtttaatatttggcaaatatgccccaacatttatgtaaaattttgtcttagtctgttctgtgctactataacagaataccataggctgggtaatttataatgaacagaaattaattttttcacaattctggaaattctagaaagtccgagattagtgtgccagcatctggtgatgatctttttgctcatcacggtggaaggtggaaagaagagagagagagaaggagagagacaggcattttaaaaggccattgaaagcatgttcaactgttgttaagatttaatttacaaaccattagatttctttaatattttgtgttttaaaataacctcaggtctacatgtccagagcttttcagaaatgtttataaaatttggttgctgcgtcaccaaaaaatagcttaaaggtatataactttaagcatttgaacaaattaagattatttaaaataatgtatgtatggttgttctacatatatctacatttaagtttattttaaaaattatgcaaactaactttgcataaccgtaaccaaatagaagtcattaaaccctatttatttttgtagtattcttggaatacaagtgttttattcttgatgctatgctttctgttcagccaaacatatgtttgttcccaaagaaaaaaattgagaacatgataattaagatatgcactcaatttataagtaaataactgatgaaaaaatagaccaattgctttgataatcagttctgttagcttatgtttagggctgtcacttcaaaactggaaaatgaatcaaaaggtttttcttttccatctgttaatatcatctatgacatttggatacatatctatatttacatttgcatttttacatatacttatgtcttacttaatatagtatttacatttgttaatcagcaaattgtggtagtccttcttttaataaacagtggtagagtttgaatttttgaagtgtttattaatttataatagtggactaaaagaaagtatagttatttatttagattatcagaccatatgatgagttatgaggatccatatttattaatggttttgccttgtcaaatgtaagtcttgattactcttagctggaaagaagtgatgtttttattatttagcttaattcatctaaaataaagaaaatggctttctggcaagacatgacttcgcctttttgattacagcatttatttcccgagtcttcaaacacctcaatcacgcaaggttcaattccaattgagtgttcagaccacacaaatagtacaatgtttaatacttggtttaacaaaataagggcattagcactcacaattttgattctttacatattgcctaggctcgttaaggcaaaagatcaaagactcttttttaaaaaagggaaaaaagaaaacctccatgctagaaaatggggaaaagctgagtctgaaattaaatcctaagcctcataggttggcttttcaacagttcaaacctcaatttttcttcgctgtaactcccatttgaaacaaaatgaaattttccaaacctaagtactgtgttttgcaaatctttttggttttcttcataacagcatttctctttttaaacagtctatcgcctgcttttattagttttttatctctactctcttaattttactccttttctatttagtctcttttttccatcaccctttttcttcagcttctcctatgtcttcctgcttgaatctaatgattagacctccttgcgttctagtacttttgtctgcttggaatatgcatacacaaacaaaactgttcaactttctcagttccgtttctactattttcgtaatttatgaaaccacagtagatgtaatttgcgtaaacattctcaacatacaaatttcgtttcctgtaattctcggtatcaatttggagtattgtttatctatatcctcaaatttgacaaatgttgattattagaatcttttcctacttctcaaagaagcaacagtttccatctttaaattacagatttctggcgctttatctcatatcactatgaattacttttgctttatttaaaaaatttaaaaaagatattatgtagaaaatacattctggactcagggaatatagagaggtctgagagcttaagaagaatagaaactcatctggctagatggcaccaaactgcatcacttcaggccacacaatgttcattaacacttaaaggactttttttttttgtatataaattatatagccaaaaacaaagtaaaacataacccaccaaaaatattttgttttacctcttggttggcaattttggcatcaagcacacatactttaatcatagtaatacttttcttacagagacatggaggttgctcgctaaatagagcaaagcaaaacaaaacaaaacaaaacaaaacaaaaacacacctttcagaatgaacagggcattcatacagaaactgtggaggtgaagttggcacttactcatctcaaaggacattgtcttttggccaaggctgccatcctgtctgctttgacacttggaaatggcaactgagttcgtaacacaaaactgaatgttgcccttcttaatgtgaggagagaatgaaatagaacacaaaaaaaatggcattcaagaatataatcgccatggtggctcatgcctgtaatcctagtactttgggaggctgagatgggtggatcacctgaggtcaggagttcgagaccagcctggccaacatgaggaaaccctgtctctactaaaaatacaaaaattagccgggcgtggtggcatgtgcctataatcccagctactcaggagactcaggcaggagaatcacttgaacccaggaggggcggagcttgcagtgagccgagatcacaccacttcactccagcctgggagaaagagtgaaactctgtcaaaaaaaaaaaaagaaagaaagaaagaaaaaaggatataattataagaaatattgctgggagcaaaacagactcatcagactcattgctacactaagtcaatgatctgagtttcagaataaaaagagaattttaaatttagcacccagagtaatttgaaaaagtatgaagaagacatattttaaataggtgattgtagattgatgggattttcttgatttatttctgtacttgagctttttctctgcagtaaagtttataaaagataaacagtacccctgtattctatgaagaaacagataatacccccacttgaggttgtttttgaaaattattaattgaaatttaaagtgagaaaaatattaggtttctgggaataatcctacaacattgaaatgaatacataaagaaataaattggttaccacagctcacctctttattttgcacttttgtataacatacatcaaaaaccatattccattagtttccctagaccatcctatgacttctaccttttccttacatttcatattttcatatcagatctcatatttctcaacccccacttctatgtgttttgaccaatttttaagctgcatttctttacagagtactaggcatctcactattttattaatattaggcatattaataaaatgtctatcatcaatattatcaattattaatattgttaatattaactatgttaataccaatattcattatgtgcaactcttaaacatgctatatatgcataagtatttggatagacagattcgattgtaaaggaagaatggacaggataaagccatgtgtacagagtgcaatagtgaggtccagaaaagctggatatttgtctaggagagtttctaatgcatgacatattcggttggttgggataatttggcagtaatccctgtgcttttaaagtagtaactacaaaatagaagtgttgtaccttttgaatttagtatgtcacttctttaaaagtctgtaaaaattttacaagaatttcaatataagttcttttctggaaatgtaagtaacatttaaagaaatgtacagacaaaataatacactaagaattttacacacacaaaaaaaagttctaaatgtttaactctatccagtacctattattgcagtttaacaaaaattgatcacccttgaggtttgtggtactgttactcatcacagaggttgaaaaaccttaattgctagcttatttggttcaaaagaataaaaagaatcagaaagaaaataaatatttttcagaaatccaaaaataattctttagtgcagaattattaaatgttaatttattgccaagttccttgtatttattgaaatagttgtgctactttggggaaaatagcaaacattgttaagtgatgtgtagtgtttggttgccagtttctacatttttaaacaagggacaaatgtatctcttggggttagcagaaattaagctgtttacatatcttctcattgctcagaaattttgagccacacatatgtatggaaattcaaatgtttttatatataagagttttaactcctatagtaccttgtaacaaatattaacttccatagcaaaaaatattttgttatattttgcaaaccacttttattactggaaaagcaagatgaattcagaaataggtagaaatatcatgttctgttttttattgcttgtgacaatgcactataagtgatgaataatttttgagtgcttgctgtatttccacaccatttttgtcatcataaaagtgactgataattaacatagttctcttcaaatgtgttttgatataattatggaaatgtctctaaaagacataaaaggatcttgcatattaaaaagtcattcaccaggaagtgatattagagttacaggaattgacaggaggtggagccgaatgatagtggcaataatgagcgagtgcctcatggaagcatcagggttacagtattgaagattatgtagaactttattagagagacgagggtaaaagtggagggcactttgtatgaaggcaagctcatgaatgaaagaatgcagttttcaatgatacagcagtgagaaggtaaccctgaagtatttcttggtatgttccagtaaaaataaataaataaataaatcagatgagtattatggaaacagcttatgtatggctttgacatctagatagaatagttttatgtttgatgttgtctgaaatagggcaccataatcgatttttaagcagagttacaatataatgaaagcagcatttaatatggattattccagaagtgacaggcaatatataggtgacagttggagggtggagagagaatctggaggcagctcaagctttgaaagtccacaggaaacatttccaggaatgcaggtgtgaagtgaatgataagcttttagcttttggtggtggcaattagaacactgaaaaggagaggatacctgaggcatttaatttataataacactgtatatctatattttaatcttataactacccttatatgtttggtgttacagttgtcagttttgttccatgggcaaaataggttaccattaatgcattccttatctttctgttaaaggcattatttaaaaatccacattgtcctgcttatgcaaagatagtactacatagtactatccactattataatccactgagagcatgtactttgaattattttccaacagttgcagaaaaatttgctgaaacagacacatgctctctcagtccatcctcattataaacaatagctggtacttttgagattcttagtaagaattggtgaaccatttgatggcttgggactgaaagctctgtatccatcatatagaagaaggcagctgatacataatggttgccatcttccaatagtgttattaatgccatctactaagcaactgaaccaatctactatgtatagtatggaaggtaagctagctgccagaagatggcagaaaggtaaactaacagaatttgtctttgagttctgtgttgatgaacacttttgaacttctcactaattctgtagattgtcagaatacgaggtccaaattaaacttatagcaaatttgatgaagacatagagttgattctgatatgaatcttacgaatgataaaggagtacattttatatatttagagtattgattcatactaattaattggaatgccatttaggggtcatttatgatgttatggggttcagcaatacaagcatgagaattccttctattaaatagaaaatttatttcctgctctttggaagggtgaggcccattttgtaattggagtgtgaatgttgtaaacaatatttgctattgtttgattgcttttagagctgtatcaaagagccttaaccattgtgtgttattttttgctttatagcctctaacctaagcgtcaatatatattgttttcacgtattgtattgattgtatcaatgtcacgtaattttgtcagcaacagcctagtcaattccatctgtcctgttttgatgactgatttccttatgtcaataaattgacaactaagttatccaaatgagcaatctaaaaaagattgcttttaatatgctttcttccccttggacatttagacaactttataccaagtctctgtgcatccattattagtatattctggccagctaagcctctctgaaaagcatgatttttacataatacatctttatttgttatattgctgtaatcaaattatctctatgttgttgatcagggaggaattctagacatataagtaaaatattgtgtgaattttattgaatgaagcaattagggctctttgaccttctggttgcaacttctattttagaaagacattagaaacccacatttgaaaatgtctaggaattttctcttggcaatatagtgctttcatttttaaaggcggagaagaaaacttcactttctgggttgtacttgtctacagaaaaattgtactggagctttagtatgatcctgacaagtagtttaatcatccctggctgtaaaatacctaacaaagcttgagggggaagataagacttaaattttatagagagttcattgttttgggtacaatttgtctattattttcctgcagatatgatgataattataacatagtcattaaagcggaggttacttacctaaagaacaaaacaatacttctttgttaatgatgaagagaaagttgtaagtaatttagaggtgaacataaagatggaagaagtgaagctgtgccgggatcctggggatgagggagaagacatcacaggcttctgtaacactcaaaataacaaatgatgcataaatagtacagcaatatttaataagcattttgatatctttgatgaccacttcagaaaatgaacattattgaacaaagtataaagcatatttaaaatattgaatcaaatgacaaggaccaagaattgacagtaccagattatacatactaaaaagaaaacaaaaaattaagtaattatttgagagaaaaagtctcaaaatggatgtatctttaaaaaactacactgaattaatagaagttggtatagattcaaaccaggaactggaaattctttttaatttatttttttgttttatatttttttgagacagagtcccactctgtcactcaggctggagtacagtggcacaatctctgctcattgtgacctttgcctcctgggttcaagcgattctcatgcctcagcctcctgagtaactgggactacaggcgtacgccaccacgcccagctaatttttgtgtctttagtagagagaggatttcaccatgttgcccaggctagtctcgaactcctggcctcaagtggtctgcctgcctcagcctcctaaagtgctgggattacaggcatgagccactacacctgggggaaattctcaccctaaacatgagcacaaagtttatctgataattgctcatataaataatctacttccatgcaaaaagtttagatcagtgtgagaaactatatttaaatttcacaagttagaaattttaaatacaatttattatattttaattataatgtacttatttataatttaattttcattcagagaatatcataaaaaaacttgtatgtgtttcttaagctcaaagggcacaaaatcttattattttgtaatcaaagaacaaaataggaaaaacaaaacaatgtatatgagtacaaggcatttttcaccttcaatttaatgcttataatgtagtccaggtcttcaaagtagcctaagcaccatggtgcaaccacttaatatattttgatttatgtttatttgtttctacaaatcacacgatgtgtagatgagtattctcaggacactgtgtcagtagtaatttgtattggaaaaattattttgctagatttattaacatttactacatttttttcaagaaattgttcattttgtcataaaagaatttttccatcagtctataatatcaagaagaaagaatgcaaaaacagaaataaaaaggtgcatggtgagtgaatgaacaaactgtagagtgtaagatttttaggaagaaattaaggaactgattcataaataaaagaaaatggtaatgaaaacaaagtgaattgattgcaaacatgctgttgatataaccatagaatactggatatccatgggagagcttataaatgctactggacatttgtacacaactgtgtgtatatgtgtctgtgtgtgtgtctgtgtgtgtgtgtgatgaggagtggggggagaaaggatgcatcattgtattttttattctaggtttgttttttatttgtatgtagttaccacaatgatattcaaattttaggggaaaatgagaatttttttacttctgcaaatatatttaatacaacccatccaaatttattctaaatacattttgatacaatttgtcaacctataattcttcaagaagtggaatcagcagttggtaataattgcacatctgtggttaattagctcagttggttgaatcatggagctaatgaggccaaagcctgggtttgatctctgcgtgggctggtgagttttgctctattcctgggtcgtagactgcagttcaaacccaggccaagtatctcatggatgcatgccactgaccataagaaactgggcaagagaaagtaacttcaacaggtccggaacacatcttcaaactatatacagcatctgcttgttaatgtatgaagagaagcattagttatgaactcagtactctcacaaaaagacacacaggaaactttctgtggcctcaaatgaaacattgaggaataagtaatattaggaattacctaacgagcacatgggaaatagctaattcataaccacaaatagaatctatttcaaatggcaagggaagcaaaatccctgtcattcccacacattgatttttccttggtagattgtaaaggtctttaaggtgttggatgaagagttctgaatcagctgtgaaataagacaaaagagggaggagagaaagcagatggaaagccaaaatgtcacattcgttttagataaagactagaggatgtagtttagacccacaggtaagtgggctccttaacactaacctcagaattagagacatttcccaccaacatagagtaagaaaacacaggtctccccagtgcgaccagcctcactttgtggcctgataacgctttttgtaggaaggtcatccccaaggagaaaaagggaagagaaagggagtgttgtcatatatggacagatcgtttttcttacaaacatataaatcagattgggccactggttaacactgagtgagagaaggagagaggcctggattgttccatatgaaaaaaaaaatcaagagtggaaaataattcctgccacctccatcttcaactatatattttatttttaaattggataaatggccagtgtaagatgaaaaccaagaaaaatgccagaaactgagacttagactgtatgtccattgtggtagatagaaacttgtgaacttactaagaatcaatgtatctctgttgcagtgtgatggtctttcctcatggtctcccaaatttctaagggtagttggttcccagtatgtctgccacattgtgatcacaaatatcatgatcatgaagaaatgctttgtttggaaatgcctacaaataatgatggaagggcccaattgaaagtaaatattttgctgaaattatccatttaccaattcattatcattaacaatgaactcaacataacattagtctaatgagatagctcatttttttttttaaaagttatgtgtcgaatatatcctttaaacatgtcagatatattccctttagggattcacaatgcacttcgtctctttaatgtttgactttatcacaatgtttttcatactttggtaagtaatcccatctaactgctgtttgataatttaagtttgggaaacactaatcaaaaccataatgtgagcaagttctttgtagtaatattttatgatgtttagtttactaataattatgaatagataatttatctttcaatgatgtttgcttttaaaaaagctataaattcatggcatagtaagttgaaataacattttagttgtagaaatgataattaacagctttttgtagatgctgttttgtattttttttactctgttatggtctatagagaaagactcttggagtgcatttgcattgctgccattgtgattttctttttttattattatgctttaaggtctagggtacatgtgcacaacgtgcaggtttgttacataggcatacatgtgccatgttggtttgctgcacccatcaacttgtcatttacattaggtatttctcctaatgctatccctcccccagcaccccctgcaacaggccacagtgtgtgatgttgcctgccccgtgtccaagtgttctcattgttcacttcccacctatgagtgagaacatgcggtgtttggttttctgtccttgtgatagtttgctgagaatgatggtttccagcttcatctatgtccttgcaaaggacatgaactcatccttttttatggctgcatagtattccatggtgtatatgtgccacattttctttatctggtctatcattgatgaacattgggctggttccaagactttgctgtgaatagtaccacagtaaacctacgtgtgcatgtgtctttatagtagaatgatttataatcttttgggtatatactcagtaatgggattgctgggtcaaatggtatttctagttctagatccttgaggaatcaccacactgtcttccacaatggttgaactagtttacactcccaccaagtgtaaaagggttcatttttctccacatcctctccatcatctgttgtttcctgactttttaatgattgccattctaaatggcatgagatggtatcttattttggttttgatttgcatttctctgatgaccagtgatgatgagcattttttcatgtgtattttggctgcacaaatgtctttttttgagaagtgtgtgttcatatcctttggctactttttgatggggttgtttgtttttatcttgtaaatttctttaagttcttagtagattctttaagaatcctacatgttatttgtggcttacaaaaaactttaaccttagcttatatagagatattgattgagtttagatctcaacctcaagattccattgaaagtggttatacagacatctaagttcatttattcctctttaataatacatacagtcctattattatttatacagttaatttatcttcggggaagtcgtcaacaaaatgacatcacaaaaattaatcaattacattcaaatggaataaaatgtaatcatggagattccaaattatattaaaaacatctgtatacaaaatactgtttaaaattaggccttttgttgcaaaaaaagaatttttaatttgtcgcccaggctggagtgcagtggcaggatcttgactcactgcaacctccacctccctggctcaggcaatccttctaacctaggcctcctgagtagctgggactacaggtgtgtgtcaccatgcccaaccaacatttttggatttttggtagagacagggttttaccatgttgcccaggctgggaaaataattccttttttaaaaaagccatcttttggtatgtttgtttattatgattctacttaaattctcactgaattcttttccagaagttattgcaaaacagaactctgaacattcttcctgttcttttctgcacaagcaaacagtccatccagataatccggatttcgccaaactcaaactttacttttacttattgtcagtgaattttactcccctcttaaaaatctagtgatctaaaccagactaaaaaaaaagtgttctataaaattatacagggaaaatcattttatattgtatgcctcctcttatcttcatcaccctcataggggcaggcaggctggagcgagagagaaatagaggaagagataaaggaagaaaaatgcaatagaatgtatgttttccctgaaaagcacactcagtgaacaaaattagcccttgggttgcacggaccctgggttttacatcatggctattgtttattacttggaagtaagtattatttcagtttattgatttgtaaaagagaataatagcatctaccctgctaaactttcaaagatattaactgacataatatatgtagcatcatataaatgtacagtcatgtaatatgtgcatatagatgtacaataatgtacatgatataaatgtataatggtagcatcatcgccctttttaagaaatgatgctgagaaatttttctagatagctttctgtttataaatattttcaatgtaggtataaagtcctgaggtgtaaaaaaatgactgtgatggctaatatttaatttttagtatgtgctagacatgttctgactcttttagatgaatatatttttatttaattatttcaatgacccaattaggtaattatttccttttattcttattgcaaaggagaggaaagtgaacacacgttgactaaatggcttaccccaggttacaatgcaaaaaggggttcaggttatctcgtctacccttagttttgacaggcaatctcttctatagaatcctttcacacaatgttccagcctcttgtgaaatttattccggtaaatgaggcagggcatgctagtatgctcatttttctgtgcagactcccttccacagtaactccatagatttaaaacaaacttttgtccttttttttttttcaacttttattttagatccaggggtaacatgtacaggtttgttacctggctgtattgcataatgctgaggtttggggccaaatgatcccatcactcaggtactgagcctcgtacccaatagctagttttacagccattgacctcctcccttcctcccacctttagagtcccaagtgtctatcattgccatctttatgtccatgcgtaccgaatatttagctcccacttataagtgaaaacatgtgatatttggttttctatttggcaaaaaattaacttgggacagtgtcctccagctgcatccatgttgctgcaaaggataggatctcattgttttttacggctgcatagtagtccatgtaccacattttctttatgcagtcctctgttgttgggcccgtaggtagattccatgtctttgctattgtgaatagtgctctgatgaacatgccagtgcatgtgtctttttcatagaatgctttgttttcttttggctatatagccagtaatgggatcgctgggtagaatgatagtccaggttctttgagaaattaccagactgctttccacagtggctgaactcatttacattcccatgaccagtgtgtaagtgttcccttttcccgcagtcttagcagcatctgttgtttcttacttttagacaatagccattctgactggcctgagacagtacctcattgtggttttaatttgcatttctgtgatgattagtgatgtggaacattttttcatatatttcttggccacttgtatgtctttcaagatgtgtctgttcatgttttttgcctactttttaatagcttttttaattattcaattgtataagttccatatagatcctggatatcaggcctttgtttgatgcataatttgtaaatgttttctcccattctgtaggttgtctgtttcctctgttgatagtttcttttgctgtgcagaagctctttaggtcccactttgtcaatttttgtttatgttgtgattgcttctgagaacttagtcataaatttttttcccaaggccaatgtccaaatggtgtcgcctaggttttcttctagcattcttatagtttgaagtcttaacatttacatttttatttcatcttgagttaaatttttgtatatggtgaaaagtaaaggtccagttttattctgctgcatatggctagccagcatcaagaataggaagtcctttctcccttgcttacttttcaaatcaattttgttgaatatcagataggctgtaggtgtgccactttatttttggggtcttgattctgttccattgatctttgtgtctatttttctactaggaccatgttgtttggttactatagccttatagtataaagtcaggtcattgtgatgcctccagatttgttcattttgcttaggattgctttgcctatttaggctcttttatggttccatgtgaattttagaatagttttttcaaatcctgtgaaaaatgacattggtagtttaataggaatatctctgaatctgtagattgctttgggcagtctggccattttaacgatactgatgctttcaatccatgagcctggagtgtttttccatttctttgtcttttagtagtgttttgtagttctccttgtagagatctttcacactctgggttagatgtattcggaaatattttattttttgtgtgactattgtaaatgggattgcatttttaatttggctctcagcttgagctttattgatgtatagaaattctactggtttttatacatttattttttatcttgaaactctatttaagttatttatcagttccaggagtcttttggtggcctctatggttttctactagttataatggaaataactatgattattaaaataatcactactataataattatgattctaataaagaatcatatcatatatgaagagagatagcttgacttattttcctatttggctgccttttatttctttctcttgtttgattgctttggctagcacttccagttgtatgttgaataggagtggtgagagcgggcatcattgttttgttctacttctcaaagggaatgcttccagtttttgcccattcagtatgatgttggttgtgagtttgtcataggtagcttctattattttgaggtatgttctttcagtgtctagcttcttgagggtttttatcatgaaaggattttggattttatcaaaagctttgaagaagcattttgttgaattaagttgatacttattttttacttattactaacaagcataaatacctgaaactgtagaataaaacacttctacaatatatcacttctattgaaaaaaggaatttcagtaataatttggacaaatgatagtgaagggagtaggaggggatatttctaaaaaaaattctgatacatcacaacaagactttataagtgtaaaattagatgctgcttattatgtacatggagaaaggcattttgtagtgtagtctgagcaataaccttttgaaatgaaacatattaatcatgcttgctcaacatatgtaagaaatctttgtaaacacatatgcacgtgttatcatttcagaagctcaggctaaatagttaaatagatccattctccacatcctagataaatttctgggtaaataaactatcatctagatttatctagttacatttttagataaatttatctggatacatttttagataaatttatctagatacatttttagataaatttatctggatacatttttaggtaaatttatctagatacatttttaggtaaatttatctagataagtttctggataaactatcatctttatcaaattcacatatctgtagttaaacactatgatcacagatccattgtctgtaaagtaaataatgcaaatgaaattcagaagtcaattctgaccccagctctactatagacaaagttgtttccaaaaacaagtttgatttcaagttgttggattgaaaaaaacaaaaaacaaaaaagtatatactctgcatatctagatattacttttagctttgctaatctagttctcttttctatcttaaaataacaaatagaaagatagtcttctttttaaattgaaaacataatataaaaagttgtaattgtttaactgtatacatacacacatatatacatatagacatgcacaaatacatttatgtacacacattcttcccttttcatatcactttccatttttatttttctttaaaagcattttttgagacatggctatcactgtatcacccagtctttaatcaaactcatgggttcaagtgatcctcccacctcagcctcccaagtagctggaactgcaaggatgtaccactatgcctggctccattttcaagtaataaggaaacacagatttgaccaagtagtgctgggatttgttcattagaaatccatttcaaaaatattttgaaaacatggtcaagacacataatgcacctgatagcgtacttgaattattctatcaaaaatatgcaaataataaatttattgatgtatatacattacacctagctttgtgttttctcctttctatcttctgcccaaagtgggatatgttactgcctatgagccaccatagagcaaacactagagtgactgcttactttttttgtagccttctagatattacatcattggaatgtcagacaaagccttgaaattcatactccatcaagtatgtgatttttgtaatactttaggaacagaataaattttaaaatatttcacaggattgtgaaatttttacccaccagtgtctaggtgtacatgaaactcttcagattttgttttcaccccttctcacccaacctcctttttacaactgctctcagttatgaccagcactttacacttttaaaagtacacatgacttaactgtcataagccatcagaggaaaaacatttggccttatgttaaagaactttttcacatgttttatcatttctacaagattttaagctttttgaagacatggaactatttctcgtgtagcactttacacatatgcagtactcattttttattaaatattaaaggagtgaaagccatcttcacactattctatgattggattatctgtatgttttttctgggccactgaagattaagttgaataaacgaggagctggcacaaaccctgacagatagtagaaagttgacatcctaacagagacaaagaaagaagtataaatgaagataatgaaactcaaaatataaataaaaaataaatataacataatataataaagaatataaaatataaagacgatgtagattaggggtaaataaattctattttttaaaaactgtatggaccttctactttgggcagtaggctacatagacattgaatattacagcaatttaaaggatcatattcttttttgtgaaagactatcttgttccattaaggagatgggacactctgttcaatcaaagtgcaaaatcaaagcctataatcatgacacctagaaaactaaatttacctagaaagctaaaattatgataatgttttctgttttgtaactccaaatatgcaatagtttctaaatatatataatatatatatttagatacatatatttagataaaataatatataatatatttaaaaacatattttttattttaaaaattattttaaatagtctttggttaagttaatttctaggtatttctttggttagtttctacatactgaattttatgtgtggcttttgtaaatggaattttttaaatttcattttcaggttgtttactgttcgcgtatagaaatgctactggtttttgtgtattgattttgtatcctgcgattttactgaatcagtttatgtacaaatcacatacattcttttttttctttttagttacacaggtattttgtaaaatgaagttattcttcacaaacataatatgaatgaaattatccttgcattactctaaaaatgaatgttatagataaacaaaaatcaatgttttcacccatattagtatggtaatctagaaaagtttgtatgcagaacatggacagtaaactccttctatagtccatgagatgattgcaagtataaatcttacgagatttccatttggttctcctggagataagggatgcttaaaaactgacgtattcagtccagtggccattaatatggggataatctggaatattccattgtggatctggaacaaatttaacacaattcactacagacggcagtgtatgaataatccatgtgttttgctaattctgcctgctcttggttcagtgacatgctttttaaggagaatctgtcattacacatgcagaagacattcaggcctgggggatatcactactccagcataacctcaagttagtggggagattaaagtctgaagtcaaaattatttcatctgaagtcaaaattgttataaaattgaaaacacatacttgagggtaaagtgaggtcatagagtgacttttcaaaagcagaatatactctctataactgagaaaagacagaggaagagtgcctggtgggctgtggtaaacagaaaaccgaggtgcagctccttttgtgcactcagacaccatactgggttgttcactggattcactctacctttctaggatggcattaattaattattattcatttttcattcttcaaaacacccacatttgcacctagatattgcttgagcatattcatttgactgtggagaaacatacttatcaaataatccagttgcaataagggaataatgaacaggtattttcagttctgggggtcatgccctacccagcagtactcccaattaatggttcaaatatgggattggctcttcactgggcagctctggctcaagcttcacttctttccaaaggcttttccacttacttgaggtgatgcaattgatgatgtcatatgtacatttgatattgaatcaagaaagccctgatgatgcctcccattaaatagaaagaaatgtcttgaatatttatgattttgttatttaagtctgaataaaacctttcatttgctaaatggttgttcttatagcccatcctttcctttaaatctgaaattagttaatacataaaatataactcctaagtggtcaagaaagatgccagacttcctagactgctatacttaacatgcaaacctcacttggcatgtaaaccagaaaatgaaatattgtgaatggttaccgtaaatgtcttcttaaacgaagtccaattaataaaacaactaatagttttactggtctgcaacatctttgactacccaaatttattcattttaaacttgacgtgatttatcatttttaactcaatacagcactaggacctctttaaaatttcatagaaagaaaggatttatgacatatatttaaaatttattggctaattttttttaaaaatttcaaatcaatttatttcaggccattgtaatctggtttatatggtcccagagggatgactgtggaaacccaaattcttagaccagtcaaaaccccactgaatctgccagacaaagattgaatgaagacctgaaggccaaatctctagatctgagaagacaaaatatctaaaagcagcagaagaggcattatacaaaattacttagaaaaagcccttatattaaaaattacatattattcagtttctctgttttggaaaattaaaaattaaatgtacaatttttatatttattacaaaagtaagggttaaaaccctaaaccacttaaaacaccagttttaccacacacttaaacacagaactcttccccaatgcgtgatgggtagcattatactagcaaagataaccgtactttatgaacttcatacttgtgtaagttgattagggaaactatttttagagttatcaatcgaatcaattcacataaattgcttggcacaatatctgtactttagaggtgcttaaaactattattatttttctatttgtgtgtgtgtgtgtgtgtgtgtgtgtgtgtgtgtgtgtgttttttgagatggagtcttgctctgtcgcccaggctgaagtgcagtggcatgatctccgctcactgcaagctccgcctcctgggttcacgccattctcctgcctcagcctcccaggtagctgggactacaggtgcccgccaccacgcccagctaattttttgtatttttagtagagacggggtttcaccgtgttagccaggatggtctcgatctcctgacctcgtgatccgcctgtctcggcctcccaaggtgctgggattacaggtgtgagccaccacgcctggccctatttgtgtttattaactaaaatgttttaactataacttttaagtgtgttaatacatattgactcatgtcagtaatgataaaacctcatttcactttttggttggtgttttaagaacttatgtttatttaaaattcatcattccactatgcagccatcaaaaggaatgagatcatgtcctttgcaggggcatggatgaagccattatcctcagcatatatacattattacctcaaaatatacattattacctactatcattacctgcatttaggccttgcttttaaatttctctttgtgatcgacatggttttctttctttctgacaaattaatttcaatatccttattattgtcatcaactactttaccctcctgctttgcatgccatctctgcccctccatccatccctgtcaagtgccacctacaaccacagcacaccataccacagtgtttcttataggcttttttatttttttctgttgcctaggctggagtgcagtggcaccgtctcaggtcacttcaacctccgcctcctgggctcaagcgagtctcccgcctcagcctcctgagtacctggaattgcaggtgcccatcaccatgctcagctaatttttgtatttttagtagagacgaggtttcaccatgtaggccaggctggtctcgaactcccaacctcaagtgatctacctgcctcagcctcccaaagtactgggattacaggtgtgagccactatgccctgcttcttatagccttttttattaatctattttttcccaacttcttggtctaaataaatctgaatttttcaactagtttgcctcatgcaattttctcctctattgattctcaaggcatgaatcatcaaagcggtcttgtcaaaaggaaacattatttttttactaaaattatgaagaaattgaagcaaatgtgatttcaaagacctaactttatccaattttctacttttttccaagctctacattttcacagtaaaacttctgttttatcttttaacaacatgataaagaaaaacacagatggaagaacattgagggggaattcctaaatgggagcagttagcagctatgaaaatgtagatattcaagaagaaaagaaaaagtaagcaaaactgaatcatgagaccatagaagagtcaaaaaaatgtcaatttatctcagctttctgcaaactacaacccatgggccaaattcaaggtctgtttttgtacaatctacacattaagaatggtttttacaatgatacgtgttagaaaaatgtttagaaagtcatattttatgatgtgaaaattgataaaatgttgttgtccataaataaagttttattggaacaccatcacactttcatttatgtattttctatgactgtttttatgctgtaacagcagaattaagcagttgcgacagagatcatatgacatgcagcatgtaaaacatgtattatctagcccttcatagagaagtttgctgtctccagatttagaacattcccctaagttaattttcccagctgattacatcactgtttattgagtatcagctctggaatttcaagttcaaataaaccaaggagtaccttcagattttttcattagagtttttctttacagtaacacaaggtgggagcaaataaccagtaagagcagttaccttcgtgtatctgtcattttacaaaaaattaactgttcattttgggataactgtagacttatgcagttgtaagaaataaaacagagttaggttaatctttatccagtttctccagtgctaaaatcttgaaaactgtagtacaattggaaaacaacgaaacagttgtacaaaacagtacaactgaaaacaatattatagcccagatgttaacattgatatagacaagatacagaatgtttccattactattagaatcccttgtgttgcccttctatagatacacctgcttctctctcaatcccatctctgccttcactccttagcaacttacctgttttccatttctataattttaacatttcaggagtatgaaaatgtaatcacagaatgtgatctttggggattggcctttttcactcagcataattctcttgaaatcaaccacattgctgagtttatcaatagtttgcttcttattgagtagtattccagggtatgaatatactacattttaaccactcatcagctgaaatacatcaaggtggtttccagtttggggctattgtgaataaagcttcatgtatagatttttcatgtaaatagaaatttttattttgggggaatacattcccatgagtcaaattgctggaccatatgttaagtgtttgtttcatttttaaaataatttggcaaacaatccccagagtggctgtatcattttacgcttttgttagtaatatatgaatgatccaatatactcacctacatttggtgttgccactactgttttgtttgtttatgttagaccttctaacaggtatgtggtgatatctcattgtggttttaatttgcatttccctaatgtgcttgtttgtcatccatatagcctcttgggtagaatgtgtcttatatgttttgcccatttgccatttagactgtttgattttttgactgttgagttgtgagaagtctttatgttttctagatactggtcctttttcagatagatggtttgaaaagatattcttccaatctgtggcttgtcttttcattctcttaatggaattgttgggtaggaagtgtaatttctcctcgacgctcataaattcatagttcaaacagacttcagtagcaaaagacaaacaagagaaaaacaatcaagtttattaatatgcacagtgcctatcactcgggagaaacttcaatgaaaggtaacacaagggagtggcttagaaatctggtttatatagaatcttcgacaaacaacaatgtattttagagaaatgacatgacaaagaaaagcagttttaggcttccagaggcaggaagctgtgggaagttaaatatatagaaaaaaactaatggagtaagatttgtttgtagattcctctggtgccatctctcagctgataagagttgtttccagaaaggatttataccttctccttacatggaaaagggtgaggatagacagagctcttcctttgttggctgtttcgtgattgcctttagctcaacaatatttgtgtcacagaggcacattttggggtgacatctctggtttccttcagagtattttatggagcaaaagtgtttaattttgatgaatcaacttaccaatttttctttatgtatagtgattttgttatgaattccagtaactctttgcctagttccaggtcctaaagatcttgttttgttattttctaaaagttttatagttcaatgttttacatttaggcctgtgatccattttgagttaatttgtatgtaagatgtgttatgtagatcaaaattctccctctcttccccttcactcccctcctctctttatttgtctctctctcttcctctctctctctctgtctctcctgtggctgtccaattgctgtgacaccatttgctgaaatgactatcttttttctattgaattggttttgggtcagtcatggctgtaatcccagtactttgggaggccgaggcgggtggatcatttgaggccaggagttcgagaccagccaggccaacatggcaaaaccccgtctctactaaaaatacaaaaagttagccaggcatggtggcacacgcctgtaatctcagctactcgggaggctgaggcaggagaatagcttgaacttgggaagtggaggttgcagtgaaccaagatcgtgccattgcactccagcctgggtgacagagcaagactccgtatcaaaaaaaaaaaaaatggttttgtatctttgtcaaaaatcagttgtttcttgggcatgtatatacgagcctcgttctaggttccctgttctattccgttgattggtgtgtctgtctctctgccaatactgccacacagtcttgattagagtcacacagtaacctactactatttttattattactaatttattttacatatattattaggtctaatgttagtatattatactagttaaaaatcagtctttacatcaaatagactaattcctgctgctatatattttttcccaaaattgtttcagttattctagttccattacatttccaaatacatttggaatacttttatctatatctataataaatcttgctggggttttggtcagaattgaattaaacgtgtatatcaatttggagagaactaacatctttgttgagacttgcaatccatgaacataacaatatctctctccagatctcttaggtttcttatcagcattttgcagttttcatcacacaagtcctgtacatgttcttttatctacacctaaccagttcatttttttagcaattctagataatattgtgtttttatcttcttggcttattgctgatcttagggagaaagcatttagttttttaccattaagtataatgttaattataggattttttttgtaaaagatctttatcgagttgagaaagttcacctgtgttcctagtggtctgagaatttttagtcatgaatgggtgctgaattttgtcaagcgcttttttttaatttttgctttgattgatattattatgtgatgtttcttttttagcctgttgatgtggtgaattgtactgattgatatttgaatattaaactggctttgcatccctagaatatacctcaccaggtcactgtgtactaggttggtgcaaaagtgcttgccattttggaccatgaattttgaatcattaaaactaggctcaaacacatctgtattaatcaaagtaagaaccattacaatcaacacaattttgccaacaagaaataagtttgtttactcctgtagcataaaaatccgtgctttgagattcgaggaacttttggaaagcactttctgcatcctgctggttgtggaagcgttttccctgcaaaaagttgtcaagatgcttgaagaagtggtagtcggttggtgagaggtcaggtgaatatggtggataaggcaaaacttcatagcccaattagttcaacttttgaagcgttggttgtgcaacatgcagtcaggcattattgtggagaataactcggccctttctgttgactaatgccagctgcagggattacagttttcagtgcatcctatcgatttgctgagcaaacttctcagctataatggtttcaccaggaatcagaaagctgtagtggatcagaccggcagcagaccaccaaacagtgaccatgacctattttgggtgcaagtttggcttggggaattgctttggagcttcttctcagtccaaccctgagctggtcatcacaggttgttgtataaaatccacttttcgtcacacgtcacaatctgatcaagaaatggctcattgatgttgtgtaaaataagtgaagatgacactccaaaacgacgatttctttgattttcactcagctcatgagacacccacttatcgagattttcacctttccaatttgcttcaaatgccaaaagaccatagaatggtcgacgtcgagttctttggcaacttctcatatagttgtaagaggatcagcttctcaattggtcattgttaactcccaatggccagccaatatgctcctcatcttcaaggctcttgtctcctgtgcaaaacttcttgaacatgactgtactgtaggcttattagcagttcctgggccaaatgtattgttgtcgttgatgtattacccattttgaactcaaataagaaaattgcttgaatttgcttgttgattaatgttatttccatagtctaaaataaatgtaaaataaacagcaagtaataagtcattagtaaaaaacataaagtgagaaatgcccattaaaatgatgtataacataaccacatttatttaagaatgtatttcttttttttttttttctttttttttgagacagagtcttgctctgtcgcccagggtggagtgcggtggcgcgatctcggctcactgcaaactccgcctcctaggttcacgccattctcctgcctcagcctcccaagtagctgggactacaggtgcccaccaccacgcccagctaattttttgtatttttttttttttagtagagacggggtttcaccatgttggccaggatggtctcgatctccagacctcgtgatctgcccacctcggccagccaaagtactgggattacaggcgtgagccaccaagcccggccaagaatgtatttcaatacaaatggcaaattccaaccatgtactcacctaatataattcttttttatatattgatgaattttatttgctaatattttgttaagaaattttgtgtccatatagattcctcctcttacactgtcttgtctgatttaagtatcgcaataatgtcaacttcataaaataaattgtgaaacgttccctcttccctattttctcaaaaagtttatgtagaattggtgataaaactttcaataatggccagatgcagtggctcatgcctgtaatcccagcactttgggatgccgaggcaggtggatcacctgaagtcaggagttcgagaccagcctcgcccacatagtgaaaccccatcgatactaaaaatacaaaaattagctgggtgtggtggcgggcgcctataatcccagctactaggcaggttgaggcagaagtattgcttgaacctaggaggcagagtttgcagtgagccaagattgcaccattgcactccagcctgggcaacaagagcgaaactccatctcaaaaaaaaaaaaaaaaaaaaaaaacctttcaatatttgttacaattatccagctaaattatctaggcctggagatttctttttgagagagttgttaaattacatattcaatctctttctttctttctttttttaaaatagagacagggtcttgctttgtcacccaggctggagtgtagtggcatggtcatagcccactgcagcctcaaactctggggccaaagccatcctcccacctcagcctcctaattaggtaggattacaggtgtgcatcaccacaactagctaatttttaaattttttcgtagagatggtgtctcactatgttgcccagcctggtctcaaactcctggcctcaagtgatcctcctgccttagcctcccaaagcactgggatcacagacatgagccaccatgcctggccttcagttttcttaatagttataggactcatttcattatagggatcagtcaagtgatctaattcatgttgagtgagttgtggtaatatgtgtttttaaataattggttcatttcatctaagatattcaatttatgtgtttagtgtagtttgcagtgttcccttattatgttttgctgtgtgatatgccctgtttcatttctgatattgataatttgtatattcttatttctcagtcttgctgaggggatgccgattttattaatcttttcaaatacgcatgttgttcatcgatttctccctgttgtgctgttttcatttttgcgtacttgtgctcttattttctttctcttctgctttaggctgattttgctcttcttactcttgttttttgatattagacctttgattatagatttgagacttttcctcttttctagtttatacatttattgctattacttttgctgtgagcactgctgtagctgtgtcccacaaattttgatatgtggtattttcattttcattcactccaatttctttttctttcacttgagacttcctctttgactcattaattatttaggagtgtgttaattagtttccaagtgtttggagattttcctgttatctttctgttattgattgctattttgatcatattgtggtctgaaaacactttctgtatgatttcagttatttttaatttgttgagatgtgctttacgtgctatataatgtgacctatcttggaatatgtttgtttgtgggcacttgaaaataatgtgtatacttctgtggttgggtggtatggttaataaatgtcaactagattctgttgatgaatgatttgttggattctatatccttgataattatctgtttaattgttctgcccattattgggagatgtgtgtcaaagtatacaactataaatgtgaacttgtcggccgggagcggtggctcacccctgtaatcccagcactttgggaggccaaggcggggggatcacgaggtcaggagttggagaccagcctgaccaacatggtgaaaccccgtctctactaaaaatacaaaaattagccaggtgtagtggcatgcacctgtaatcccagctactcaggaggctgaggcaggagtattgcttgaacctgggaggcagaggttgcagtgagccgagattgcaccactgcgctccagcctgggtgacagtgagactccatctcaaaaataaaaataaaaataaaaataaaaaaataaaaataaatgaaggtgaacttgtctgtttctcttttctgtttcatactctacatattgagcagctttgttttggtgcatacacattcagggatgctatgtcttcttgctggattgtttcttttatcattgtgtgatgtctacctgtgtctctggtaattttctgtccttggaagtctattttatttgatattattaaagacacttctgttttctaatgtttgactaatatgcttactttaatcattttactttcaacctgtttatattgttatatttaaattttcattgtagacagcatataattgggccatggtttttaaatccactgtgcaaatctctgccatttcattggtatattcaaacaattcacatttacttcaataatttatttatatgatttaagcctgccatttgaatagttcttttttgtttgttctttctgttttttatttctctgagttttttctcctgcctttttgtggtttacttaaacaaattttaacatttttagaattttgacatatctagaatttttttttactaaatttcgttatgtaattttttagtggctgctttatgtattatgttacatatacataacttatcacagtctactagtatcctcattttaccatttcaagcagttaaaaaatcttacctacttttgtaccttcactcttacccatttataatataattaattgtcttagatatttcctccacatgcgtttagcactataccagacagtgctctatttatgtttccacaatcaaacataatttagaaaactccagaaaaggaaagtctgttctatttatccatatttgtatgtactgaattctttcttcctttctaaacttccaagattccctcttttgtcttttccattctgtgtggacaacttccttagccattctgtcaggttaggcctgctagttgaaaattattctagttttctttatctaacaatgttttcctttccccttcatttctaaaggatattttctatggatataaaactctaggttgatagttctttgctttcagcaagtgaaacggtcatgtcctttccttttggctcccatggtttctgatgggaaacccactgtctgaatcatttttcctctatagataagactgtgttttttcctgctcttttcagattttttctttaagtttttgtaagtttgactatgatatgctttggtataaatttctttggttttattctgtttgcggtttgctcagcttcttgaatctgtgtcctttttgctatattttggaagtttccagccactatagccactatttctttgaggatattttaagcattgccctttttctcctctctttctgggattctagtgacacagatacaaatgttttattttttgttatagtttcacagttgcctaagtctctgtttttaagtatagtttatttctgttgttcagattaagttatttccattattctttcttccagttcactgattctttcttctgccttctccactctgctgtcaagtacatcctcttagtttttgataatttcaattattttatttttctgttctaaaattttatctgattattctttgtatcttctatttctttgtcaaaacttttacctttttcgtttgtttccactatgcttataattgcctcttggagcattttcatgacagctgctttaaaatctttgtcagataattctaacatctctgtcatctcaatgttcacatgtatcaatagccttgtaaaaattcagtttgagatcttctttctgttttgggtgacaaatgattttcggttgaaacctggacatcttaggtattaggtatgaggttctaattcttatttaaaccttctgttttatctggcttcttcttacaccacgccggccgggaaaagggagcatgccgccttgttactgccagatatggatagaagtagctcctgctcttcaatgaacctccgttggtttctgctaccaaactgacctccactgatatcttcctggcaagaaaaaatggagtagtttgttgctgctcttattgtggtcttcaccagtgctttagaagttgagggatagcatggtagcctcattacagctggacagtttcaaatgttctcaatctccaccaaacctcctctcatactacctcagtggagagggagatggatacctcattattgttgagtttggggtggaagtctagactgcccatttagtcaacatagacactgcatgtagggtaagagaagaatcttgctaacccccggcagggatgaaactcctagattcctgctcagacttcttttacactactctgggtgctggaaggagagggtgttggaataccctggcaaggatcagcgtctgggcttgccactttgcctttgcaggtgtacatggggatgggaccataattctttttgtggtgttcaacgagagcaaaatgatattgctttctgtctttctaggctgcccctttcttgttcctttgactagagagaacagcctttcgttggaacttggtttttttgtctgaaccagttggcatttctgggttgcaggcttcttcagctctgaggttttgatgtataaggtaaaaattttaaatccatgtcattccttgagtccttcagtctctagctagtttttcatcttctctcagcttttcagagtctctttaaatttctttgatatgtaatgtggagagattttagttgtacctagaaggggaattagaaaaaactacgtctactccatctttctacaagtgaaagtctcccattactttgcttctttttaaaaattgtttttaattgggaagacagcatacaattttcacatcagattctttcaggaagttcaacagaattatacaaaactaaccatgaatttagtattaaaaaggaaaccttcagacagagaaaacatctctaatttattttttaatatccattttacttccactttgcaatttccatcggtttgtttcttgacaagtttgtctcttttaggacctgcaacatctctgtttagtagtgagcttttctcatttaaaagtacttactgaaagactcccacatgggagtcacatcagtttctttcactgatgttctcctatgcctatcagaaggcctggcacatactaggacttaataaataatctgctgaataagtgaatgagaactggaaatttaaatttttatgtcaatgaatgtgtcatctgctttcttgttttgctgaatcatggggcttaagtttctgccaagcactctttaaatatgtgcttaggacactagcagatttgtccagaattttgcaatctagaaaaaaagcaattttaattttagcccgtgtgtaaatttttagtttatggtttagaattgcattattttgaattacaaatggggaggacgacatgatggttctcacgtgtgtgtatgtgtgtgtacacattcactcctatcgttgctaaagaaagtcacctgaaggacatggcacaaaaacaaccacaaaccatttttagttatgtttcctagatgcctgaatcatttttcagatttttttctattagacaagtcacagtttgattatctttgaaagtcattgttatgtattgtgcagtgtatgtgtttacacatggaaaaggggcaacattaatccatcatttggggaagacactgaatataatgttaaattttttgcaaacaatcatactttagataaagattctccaattattgcaacatttttaaaaaataaagttaaaggacatggttctttttagtgccgctcagtatgtttggtttctgtactaataatgcttgctttcctgtttggctttaaattctgcttaaggaaattgtgaaaaatttaattcactctacttttgttagaaagtatagaaatgttcgtgcatgggattcattgcctgctagaatggaaattcattggggaggggaaccatttcattttactacctaagagctgttgacacagtccctgcatctttcaaaggcatctttcatgccacgcgggcaaactgtagccagcgaagaaacagaaagagcccttctcacatatgtcagtctcagaaaacttgcatagcagctgtgctaggtaccgatgaggattactatagacccagttgcagggttttatgtggataaagagacaactggctttctcaggggagcactttgttggagattgcagcaatagtgcatccctgctgttgctagaagacattgtgaccatgtagtacaaaatcagtgccagataaaatcagaaagtaacaaaaagcaagaagaaaactcggagtttttttaaatcttaaagtgagagacgaaaacaaatgttctgggcttgtttcattcacttgtaaggaaaaggagacagatgaagggatgcctttaactcagaaaacttgaagggctttcagtcttttcatttgagaaccatttgggtgtgttgagaaaaaaagttgccagagtaggcatgttcagacctttatttgctacatttggtaggaaagattttttttttcccctcttaactacaagaagccagagttttctgtgcaaacgaaacaggcgttgcaagaatcagattcactttggacgactcttcacattccaagtcatcattgcgttaggcagcacaattccatctctggttgatgggcagaaaaagtgggcagcttgccaggtagacgtttccatgactcccagcccccaaaggtgatgcgtttttcagctaattcaatgaagagtgggctgaactttgggtctaaacgagacaatagctgccttcgcagtatcagcagaatggttgatgggagtgcactctacatttggcagagaatcatgtgaccttacgactgagattttgtgatggtgccaacggagacttggaaagcagcaaccgtcctgacttttttcttcttttctaacatggctcagaaaatggtggatcttaatacttgactttagccagactcagcaagcgactgagctttgaagcacaacttcgcctttattctgggtttttggcaggccaccaggaggctgtccctttcacgcctgataaattctgctgcttatctctaaatagaaaaaaaaaaaaaggaaaataataatagaatattgaggcataacaagtgaattctaaaattgtatgtgctttttgttttttttttttgttttttttgccttttctgactggtgatttgtatttttgttttatttatttatttattttttaggttactacctttctgcttgtagaagaatccaagtagttgggtctttttttttttggtttataatgaacaggcatttgaactgggcaaacaggacgacagcagcagtgagcatgagatcattgcattgcagcactgtagcaaactggcaccctgcctttgcacccctttggttcaggagacaaacgtgtgtaatcctcatttctaaagtcagcacagcctggaaggattcctggtctctcccaccttctaccattctgctgccagtgacggcaaggattggtgtagcttctgcgcagtgctttgtgcctggaataccgagaaggaagaaaaagaagacaagcaccctggtccttttctaagaaattacaggcgcccttgaagaaaaaatctgagtgtgtcctactacatgcaagagtgctggaaaaaaaaaaaaaaaaaaaaaaaaaaagagacgctcctgctcaaaaacaaaaacaaaagcaaacaaacaaaaatccaaaccaaaacaaaccaaaaaaagcaaacattggctgtataactacagagacatcgggctttgtaaatcagctttttaaggcaacataaccaaatgagccttctttatttttattatttcaaaccatatggcataattagcaatatattgcacttggtgaaatcgcacctttcatatcaggtataactttttttgttgtttttcttttaaaggctactgttatataaaagggaatccttgaacttttaatttacttttatttaactcattgcccactttactcttattaactttttccttttcctctcttgctctaatcttgattaaaatagaaacttaaggaaagatagaaaaatctctatgaaaaagacaatacatgtttttatgtggggtatacacagaagttttggaaagatattaatatatctgtgctttttgtgtccagtattagtttttgctatctaagaaaagtgaatgtttagacctagtgggtaaaaaaagtaaatctttcatgtgacttataatttgaaatgtgaaagaagaaactttttaaacttgtagaaaagggttatattagaatatgcgttgaatgactgataaataagattgcttttggggaagttatattcaaattatttacaaagatttcagtagaacaaaaataggaatgagaagagcatgttctcagttgctaggtagaaaagaagcttctttcataataatatgctcttttaaaatacattttaaaagaagtacttgtcctagagcagttgcaaaaagcattggaaatatcaagtgtattagaaaaagtacatgcaaacttgttttaagttcagagcaatgtattggctcagcagataactgcattgcattataattattttgtctgtttgtagaagtaaattgctaagcaatttaagcattttattaaaaaaacagttttgcctggttcagtgtgaaaggattagcagatgcattccagctattttagttttgataaaaaatgtttctaaacaagtgtaaaaataatttttaaaagagaatgcttttgaaaaattcagcaagtatcaatgaaaactataatttgcatactaagaattgacgttataatatttcggtaaaaatatactttggtaatctgttatgcttttaaaatcatattttcttatattacaaatatgtagggtaaacaatgaaaaatgtagaactgattaattctgcctttgtgtttgctattctatgaacaattacaggaaattgcaaaatccctatatactgataacattcaaataaaacgttctgttggttattgttcactaattatttacaaaatagctcttgtacctccatgctgcctcagctaatggtacaccaactttcactggcttaattaatattgataaacctgtttccatgtttcaagatccgtttaaaaacattattttaaatgttatttttagcagccattaatctctacactcttaattatcttattaagctccatgccaaatccaaatctcttttcagctttcgctacttcattgtgcaaaacctagtcgcttctttaacagccatcgtcctttcactttcaaaactgttactgtgaaaacaacacgaaccaaaatgaacgcataaatgcaaactatgaaaccactttatatgtcatatgagtagcctgggtggggccctgtgagtcttccaaggctttaaaaaaaaaatactttaaaaggttttgcccattttgatatcgtgttttcttctcgatcgtctaccctcattcccacgatccactcagatgctcctcctagacagcagttgtctgatatttctccttttgtggttgttttagggaaaaacttaaaatggatatgaaaagtgaagaaagtgatcataggagaaaaccatttcaggtaaaaataaaaaacaaagagcaaataagatttactgtttttaaagaaaaacaacattcttttgactgtgttttgttataagaattaatttcatattctttatgagtgtaactgttgaaattttattgatggttttcatttgaaaatgtgtgctatgacctacctttgtgaaaaatttcttgtggtcaattgggcagtttgtgtcccattgaatatatgtctgtgtatccatacgcttaagataggtgcaatacggtttactagaaagctttataggaaaagaaaaaaattatattttcttatttgttgtaccatataaaaggaagtgaaatcaggaggaggggaataaggtcatgctttttcatcttttttacatgacctgataagacaatgaaaccaaaacatgctttcttatagttatggtaaaactaaacccaatgctgcctcttatttcacatttgcatttataaatatatgttgaaatatttttactacaactgaatgtatgattgttgattatttactatagtttttaataattatgaggacaatttaagaataaataatggtttaaaattatgtagaacacatgatctatataaaggctataaaacgtatttatttcaaaatatgcaaaatcactaagcaattagtatgtagtattattttacacaataaagatataattaggaaatgctaagtgattatagatgtgaaatgattaatgattgtacaacttatcattttgttgcagttgagtttacaatcttaaaaaaacgtgtatgtggctggctttatgtttactcgtttgtgtgtttgcttgttgtctggtggtttaaaacattttttagtaatattttatttttgcccaacctgttgaccagatgagagttgtatgtagccatgcattttaagtgtatcttttttgaacaataagtttaaatatattttatttaggaaagaagatatcctatgtcatgtaatacatctggagtataaatgttagtgtggagtattagtaatcatgccattatcgtgccatttagtttagttttatattaactcatccaaatattgtaaattttagcaccattccgactatagacacagatgtatatatttaaggctgataataacttcctgtattctctagctagtgaacaagatcttactgttttatgagaaagttataatgttaccaattccttgaaaccagtaactaaactagttttataaaaattaaaataagcacggtctaactcatacacaattaacttaatagttaatttggttttaattataggctcgtaatactacattcatgcctcacaattatataattcatacatgcatgtatggattcttttttcttttaaaactcaattagaatagtttaattccaaaatatttactattgaaacaaaagcagttcgtgaaaaatttttcaataaactactttttaaattctcatgcatataaatttgtatttagttttgaatatttatgaaggcctttaatggagaatatgcatccttagaactcagcatttaaaacatttatactaaaggatcaatattatttttgactcttaattgcatcagatatttacaacaaattctatattaatagggggcccatgcaagatgttgcccattggcataaacccgtagatccgatcttgtggtgaagtggaccgcacaagctcgcttctatgggtctgtgtcagtgtggtaatctgacaaaatgctatacacagtgccgttcaacaatagttcagtaaaatcctgttaaactccagttgattatatacttttgaagtcattatattttcctttgtttttaatgtttattttaatcattgtctgtcttacaaggcaggcttcaattctcaacaacttggaagcgtttatatcacacccattcaagttcgattccatgtacagtaaattgcataagaaagttgaacctttatagcagggtttggaccaggatctgaatagattctgttcagaaacttcagtgcatactgtagtgcttagtgtacctcttcaacttcagtaagaaaattaaagactaccattggatttatatgtttttattgagcctatttctcctgaaaaaatgaggctgaatgcaattgacttttactattaattgcgactagaactatggcaggttagatggtcagaagacattttacgtgacctatgctggaaacccaagtgtttaggttagtcctatgagaaacagttagcagcaaagtttactggtaaaatgttagaatattatatctatatccttgccaagcccttaggtgtatggctgccatatttggaggagctgactgaagatatgataaggagtttgaagcaacattggaagctgtgtgcatccgggttgaggtagtaggttgtatggtttagagttacaccctgggagttaactgtacaaccttctagctttccttggagcacacttgagccgtcgaggaattcttcatcactttaacctgattgagccaatttgtgtgcaagaaggtaatgtgtcatgagtatcttggatcattgatttgggcctttattacattaaaatgatcatttcagccctattagattattccatttgtatctgcttatgaacaatgtcaaaatggtatttctaatgggttgtcactccatgttcaaacattttaagaaaattgtaggtagtgacttaaattgcattaatattaaagctttttatcatctatagattaacaaaattcagaccttaattttcaaatggatcattggtctatttatattggctgcttagacactataataaaaaatgtctgctagagttaatagctcccatagcacattatttgcgttttccttatgacacatcactttctaccttatgttatggctatttatgtgcttgctgattttttccgcactagactgtaagccccttgagggcaaagtccatgttttatttttcactgtatcccctccaatgccttactcataatgagcactaactatttattggattagtgaatggagtgtaagacctcactctgtgatgagtttctattgaatatttgaatgagttatggcagtggtcaaacatctgagttttatttattgctcctaaaactgtttaaatttaattcctggactgctccgcatcagtaatacatgtgtcgatttttgactgtgttgaatgtgttcattcattctaaacagataagttaaaatttagaagtactttttatctagaataaaaataatagagtaaattcatttttactaattagttcatgacagtttatgatcctacacttagataattcatatttctgttgaatttaaatacctttctttccagatgaatcgtttttcttttagcatcaatttcaactaaatattctattttaagtctcatttaacaatatgatttttaaaaattagatttgtgtcttttgtgtatttccctcgtctcctgccctttatttttgtacagctatatctgttgaataaaccagaagcaactaaaccagaaacatgtcaataaattaataataaatatgtatataaagtataatttgagaatgtgaacacatttttgtttaaaggaaaggcactttataatattctttgtgttacaaagcaaatgggactctttggaaccttagtttgctgtcaactttagcagctgttagtggtgtaatttgtgtagtgaggctatcttacatagatcatctttcagacacaggattaagtagttgttgatgttagaactttaatttaagactccaaatatgaaacatggaattcattaaagagacgtttagatgcaaatatatattaaggacctcaagatactggctatgtggtgctgacctttctagaatgctcaggcatccaaaatatcttaatacctagaacttgctaacaatgtagtgaagaaggaatggctacccccaacacgtagaacatgtgagccttagaaagtgaataccagtcacttcaagcaaaataatttgattggtctacagtagtaaagactctttctctctgtgaaagaaaaatatttgcaaggactaatcaagaagcaatgaataagaggcagtagacatagacctaaaacaaacaaacaaaaagacatgaagagatgaaaaggaaagtgactcatagcaaataggaacaccattgtgtctaatgatggcagttcaacccacggatgaaagaaagggacaactaaatgggtaaacaattgtatctttataaatagttttttccttgagagcctaggatccctttcctatgtgtttctatgtatgtatctcccaatactaggtgtatttatttagaagccaaatctattgatgggccaaatagaatatgattgccaataaatgtctatttccttacagtgtaatggagttaagtgcctcacagaggtcaagtaagatgtgcagtttaaggataatcttacaaaagtactataatgaattgttagaattacagcctcttttatatactatcacctaaagtgaatgagtataatagaagaataattgaagaatggtgaagatgtctctatgattcattatgttagttatgtagaaatcataagaaaaaatctgaccaggtgtggtggctcatgcctgtaatcccagcactttgggagtctgaggcaggtggatcacttgaggtcaggagttcgagatcagcctgaccaaaatggtgaaaccccatctctactaaaaatacaaaattaactgggcatggtggcacacacctgtaatcgcagctacttgggaggctggggcaggagaataacttgaactcgggaagcggaggttgcagtgagcctagatcatgccattgcactgcagcctgggcgacagaatgagactccgttctcaacaacacaaaacaaacaaaacaataagacagaaaaaaacctgcaaggtggaggatatagttagtaccaatgaagaaaatttttaaaacttctctgtaggacaagaacactacgtggaagaattgtatgtttgcctttgattcataataaattttgctactccaggtatgagggctatgtaacttgctacaggtttataaataaatggcaaatgtcagatatagaaattgataggattttttgagaaaccaagatataggaccactgctgatgtcagtaattaaaaatagttaaattatgtctaagaaatcaaagcgaaagattgttcatatagagggcttatgttcagctatggggaaacaactaaccagactgaataatttccttaagaattttaagtggtcaagtttaactgtagactggggttttcacatctggtaacagagtatgacaattcaggaaattattaaatatcagtgaatcatacttcgtttaaccaatatttcttttgatattttggggcacaaagttggatatgtctttatgttcatactggttgatttacctcaaatgctttgtgggatgaggcaggaaggagttttagagtgggaagggagggagggagagaagaagggaaggagggaagaaaagtaaaatcaagtgcaaagcaatcgattgagcctcaccagaaaagtccattattagattataagaactaatgagagaaagtaactatgagagaatcagataaattacttggcaattggactgggtctttttgaaaaacatccaatagtccatgaactatgttattagaataaatgaatgatttctgtaaataataatttagattctcttattccctattatcaaatgctgactaatgagcacaggtgattcctcaagattacccaaatgatctgatacaggattccgtcttcctgagcattatttcacacccatggctagtttctctgctacaggatagaggaataactcctgaggtaacttatcttaactctacctatacttgacctctaaaaccctttgggaatgcttgtgaaagatataccagaagaatactttattcttactttaatgcctactgcccaagcaaaactaatacctgttattattatgtcatttaacatgataatatcatgttcacctacaaatcctttactgattctctaagatagaatttctcagttttgaatcctcaaggcccttgccactttcattcccacagggatttctctgacttctattagtagtatttacaagtgtccaaagggactgtgacttgcctttgtacctcttgtaatgtacatgctttacttttttaactatggatatattgaatcaatgcctgtcgtcttgagttgaactttagatcatttatgggcaatgatgagaactgctacacaccttacgataaacttggtttcagcagtaaagtcatgggttacccaagacatctctagactctccagaatgtattgtcatggtattaggagtattctaacggtgcctaggtctgcagcccactcttgattaagcatgtgatataccagtggaaatgatttaggcaaccagccaatcactataatttgtagtaaatctaagcccctttatgtaagaaatccatgtctgtttcaaactgacagctcctaccataatgtttagcttataggatccattcaccactccattttggtgaatgagcaaaaattttttaaacaaaataaaaaagtgttatatattggagcaattctatatttaagtagacttcttcaaacttttaaagtttagaatttaaaataaattagaaatatcacttttggggggaattctgtttgatgataattcttttttttttttttataagccataattaatatagatttaatgcatttttccatgtattacatgatttaagtacagtcttcaaaagtgaaggagtctttacttgaaagatgttaaagtgtatatgtttgtgactctagaattttctttttttgttgtttttttttttttttttattatactctaagttttagggtacatgtgcacattgtgcaggttagttacatatgtatacatgtgccatgctggtgcgctgcacccactaatgtgtcatctagcattaggtatatctcccaatgctatccctcccccctcccccgaccccaccacagtccccagagtgtgatattccccttcctgtgtccatgtgatctcattgttcaattcccacctatgagtgagaatatgcggtgtttggttttttgttcttgcgatagtttactgagaatgatggtttccaatttcatccatgtccctacaaaggatatgaactcatcattttttatggctgcatagtattccatggtgtatatgtgccacattttcttaatccagtctatcattgttggacatttgggttggttccaagtctttgctattgtgaatagtgcctcaataaacatacgtgtgcatgtgtctttatagcagcatgatttatagtcctttgggtatatacccagtaatgggatggctgggataattcttgatctcttaaaattggcattgtcttgtgtgtcccttaatttttaaccttattctatgctatgtgaaggcgtgaattaaatcatatttctctcctacatccaatatctcttaaatcccaattttgtttctcttcatctgaactcttagagtacttatttgacaacaatcatagtcagtctgtgtttctaattactttttatatgtttatatagtatataagaagattagatcatatgctgtataatttgtgtaaatttgtacacaataggcacttaataaattgtgctttattgaaattaaaaataaaattgacacttattaatgataagaaccttagagatcaaatggcccattttccagatgaccaaactgaggcccagtttctttaatgattctgccaaggtcaatctactagttacggacataactcagatttcaaaccatttcagtgacctatccaagaagaaatattttagaattgctgtcattagatttttagttagtactccattttaatgtgtcattaaacaaattttaataaagttgattgaaattagagaatagacttttgtttccgaaaggctataaatcacatagtaatttagcttcaagctcaaatatgatagacatataattaaaatgatttaaaataaactcatcccttcaattatttctttccaagtaccattgcaccctcattcttctaggcaaagagaggaagttatctacctcagttacattctgatatttctcctccttctagaacacttctccaagagaggagagtatggcctagcagttggtggtgtatcttaagcaaaaaggaaaaaaacaaactatatattgttcaatctgttagcactgtgttgctcagaaaaatgaaagttaatattaaatggtaaccgtaactaaatccaacttcaagtttcaattgttcatgccctccatgagataggcaagatattatgtaaggtgctttcacagggatcataaacttaagtaacttctgggtccaggtagtataagccagacttttaagacaaggggaagtaatggggactgtggtagaccaaagaaggcatatttacctttaagatatttcaaaataggccaacgccgtggctcacgcctgtaattccagcattttggggggccgaggtgggcggatcacctgaggtgaagagttcaagatcagcctggcccacatggtaaaaccccctcgctactgaaaacacaaaaattaactgggcgcgatggtgggcactcgtaatcccaactactcaggaggctgaggcaggagagtcgcttgaactgggaggcagaggttgcagtgagttgagatcacgccactgcactccaggctgggccacagagcgagactgtctcaaaaaaaaaaaaaaaaaaaaaaagatattttaaaataactcttgttagtatgaatttggatcccaagggcagccagttttccatttctgatatgaaggtatcagatagtaaagcaaaatttcaaaaaacttattattttgatgaagctaacagcatcttttcataaagttaaactagataatttgggatcgttttactactctcaagtcattataaagttcatataaaagacaacttctatgctgacattgttatttcaaatagatatgtatgttgcatgacagtcgacatggtttcttgaatttaactgactaatgaaaaatattcattcatcaagcaataattagcaaccacaatattattttgatgtcattttaataaaagaagtgtagtagtagtagtaattgtaatattcttggtaggaatatataattttcagtttgtatttgcatataaaccgcaatgtacaaaaaatgaaattcttataattcttatgctcaggtaattgatgctatagatggataaatatatagcattttcaagttagaaaaaacaaaatgttaaatagaatgaagactaagttcaagtattctcatctccatataaagtcgggcaactgagtagagttcaaaagtaaagaaacattggtattgttaattatattttattgtgttataattaaaagaccaattatacataaatctggaattagatcaggttcctgtccataaattttcgatataatttaatccagtgaatctaaatgtgtaaaagagaaatgacaaaaccacttatgaaaacacagagtttctagtagtaaaaaaacatgtattgtcaattttgttgtctgttgtagaagccctcttatttaatataattgggatcaatagtcaatgagttaatgcactcagatattaaaataaattgatcttaaaaacaaatacatacacacaacctacattttatttaaattttaaacacttgattatatatttatttgccaataattttatgtaaaccaagaacttttttttttggtttacgttgttggttacagattatagtcatccttcctttcaataaatcctataatgcatcatatatgatttctaatttttcatcgcgtcatgaatgtctttaagtaagttcaaatccaatgcaaagaaatctaagagcagaattctactttctccaatttttttctaagcttctgaaattgtctttcccacatgttattctatagcattgtgggtttttttaagtgactgaattttattaaatcttccctaaatattcaacttagaggtatagaacaacaattctcattttctttacaattatatttcaatttgtttatgtgatatttaattaaattgtgcaattcggtatatgcaaaactggcataaactggtttgggagcaaacgtaatggactccagggaggcatgtaaaccacttggtgggagcagacatgttcaactgggtgttccagaaatcttgatggcgacggaactgttctctctgcactgtccaaaacaatagccactggccacatgaagctattgagcacttgaagtacgtctagtgtgactgaaaaatgaattttaaattttagttaattttagttgactcaaatttaaatagctacatgtggtttgcagttaaggcagtaggctgtgcagttctagagagtagctcacttgcatttagcatttagcagccaggatatctgttaagaatatcagataatctgcaaagtggctaatggttaagaatactactgtagttgaattaagatacacttaggaaatgcagattgatttggaatgtgtttgttttgctttttttgtttcattttatcatcttttacatttgtctttttttatatttgagtctaaatttagttttgaggaattttttaaactttattcgaaataaggaagccaatgagtaaaacgttaaacactacagagatttacagctctttatgtagcattcaattcaaccgaaaactaatcagaaagtaatgacattccttctcatattggcaaaaaaaaagttcttaattcagcataatagatccataggaaccataggatgaatttgttgagtctttagaacctttgaaatatttatattaatagtttaaatgtatgcgaatgtgcttgtgtttgttttgtttgtttgtttgtttttgagttggagtctcactctgttgcccaggctggagtgcaatgacacaatctccgctcactgtaacctctgcctcccgggttcaggtgattctcctgcctcagcctcctgagtagctgggattacaggtgtgtaccaccacacccggctaatttctgtatttttagtggagatggggtttcaccatgttggttaggctggtcttgaactcctgaccttgtgatccacctgcctcagcctcccaaagtgctgggattacaggcgtgagccaccacaccctgcccaacgtgctggtatttctaaggaaaacccaggctctgtcagattttcaagagagtgcataatttcctcaaaaagttaataataactccatgaggttactgtttaatactttttgaggtgcctgaatttaattcagtgtaaactgtgatagaatcgaaagccttcatttacaaatattgtaaatctatcaatccacatatatgttaaattataaaatgtatacatgttattaaatatgtaaaaattttatgtattgcacaatatataatttatatgtaattaataatacatttataatttaattacttagataaacctgtggaacaaagttgacataagaaaaaaggtagcttaattctttggaaggactaaattaaattggataggtaaaattggtattatattaagtttgaacatttaactctaaattactggacatatcataaaaatgtagactgaagccacacatggtggcatgcgcctgtagtctcagctattcaggagacagaggtaacaggattgtttgcgtccaggagtttgagggtgttgtgagctgtcatctccaacctgggtgatggagggagatcccatctctaaaaaaaataaaataaaatagattgagccatctctcagttttacaatataagtacatttactttttattaatgaataactgggcttattaaagtggtgctttacgagtgaggtttatgaaacataaaaagatagtcatcagtttcatgctaaatgagagaacttgcctcatgtgaaaacatcgggaaaattagaaaactgtacttttatatgtttttaaaataaaatatttgttttaatgtatttgtatgtttccctttttaatcacagttggtccttgaacatcacaggggttaggggtcctcacccccggatgtagttgaaaatttgggtataacttttgactcctcaaaagcttaagtactaatagcctacttactgataacataaacagtcttactgataacataaacagttaattaacatatattttgtatgttatatgcattatatactatattcttactctaaagtatacttgaggctggacacagtggctcatgcctgtaatcctagcactttgggaggccaaggtgggaggatcacctgaaggcgggagtttgggagttcgagaccagcctgacaaacatggagataccccatctctactaaaaatacaaaattagctgggcgtggtagctcatgcctgtaatcccaactacttgggaggctgaggcaggagtattgcttgaacccgggaggtggaagttgtggtgagccaagatcgctccattgcactccagcctgggcaacaagagcgaaactctgtctcaaaaaaaaaaaaagtattcttgagaagagaaaatgttattaagaaaattgtatgagaaaatattccactgctcattaagttaaagtggataatcataaaagcctttatcttaattgtcttcaagttgagtaagccaaagaggaggagggagaggaggaattggccttgtcgcctcaggggtgggagaggcgagggcagaggcaggagaggcaggcacactcgttgtaagttttattgaataaaattcacatataagggaacctgtacaattccaacctgtgttgttcaagagtcaactgtgacatttttaatctatcaactaccaattccaaagacatcaagtaggatggcttccactgcaatagtattagtcttcttataaaagtgagaaaaccagggtcagggagttacacatataaattccttacagccacataaaaggtaaatcccagactgaagcagatatatcttactccaaaggatttgattttaatcatcttgttataatgtctcctgtgacagagaattagaaacttgaaagcattaggtatccacagtaaaaatttgcaagtaaggtttttctctgttttatttagaatgaatgtgcagcctccccagtccaactgaccagcttcctgtgctttcagagaccttttctagaccagtattacaatttggagatccacacaataaaagttcaaggagctgtcttctctttctgagtttttaaaatatagactagcatatggttactaaacctaacctatctaaaaacagcaaatatatttgcttctaactggggatttatcaggttaatgtggtaatatgtttatttgaggattaaaaaaaaattgtgcattatcactcagtcttttaacttcagattatttccatttaaaaattctaagtatttcaaaacatgggagaacaataaactttacgtcacagactacttgagattaactgactaatatttgggaagcatctagataacacagtttcttacataatataggggcccagagaagactccgtttttccttcccccgcttaagaattaagaatcttaagaattaagaatgattaagaatcacttgaccctcacttactgttttccttcctgctctgggttttaagaccttttagaacaatgaccctcagctgggcatgaatgggaggggaatgtgaggcgggaggtgggtgtggttggaaaagtcttcaatactattcagattttacctctgcatgggcacccatttcggtaagaatccattctgtgatattatttcagaggcgaaggaaaggctacccctccttcaaaatagcttggtcttacattgcacatttaacttagagcacaatgactatcccttgttctccagtaatatagtggttgaactccaccctggagtcaggatccctgagtttatagtgagtgtgagtcaacaccaactataaaagctgaccttttcatcagtgctttgtggtctttatctgtaatgtgaaaattataacaccaatgttgcaagattttcgagagaattaaaagattatatgcacatgacctttagcaaccatgatgcctagtaggtaataggagttgaataaaaggtaattactatcattaggcatattaactgaggcagtgtattgtttgcttataaaggttccgcatgctcagtgctgcagaatttatataggcagagccgtcgcaagaaatgttgggaggtggttttttttgtttttgtttttgttttttctgacggtcctcttatcttcaaaacatcatggcactgctgcctggatttgctggtttgaataggccacatttcagctattcttctcattgtcaggtcatggcaaataataagtctcaccttttctttctgaaattgcattcccgcttcattcatctgaagttaattcttttcttttttgtatcatgcttattttgcaaacatgaacaatcttgtcactaccgtgtatatgcaaataaagtgaaatgataaattgcttaagtgtctccgtttttctatctgtagaataggggtcataatcccttcctgttgcacttttccagacagttgagaaaataaaaacacgtaatgtagagaaaagagcatcagtattctcataaatagaaaattaagccatttagactatgtacaggaagtttgataagtagacttccagaaaagaagtggcaaagtattctttaattgttcattccctaagaaaaagctgtctctctcaatcttttgatacctctgtctttctttccctctctgtctacccgcctctgttctgtgtgcctagatcctgttaatattttctctcctctactattttcatgtctgcatgtaattttttttcatatctagccaagtgccaaaataacattatgtttgatatatcaattaattttttaattaaatcaattaatgagaacagctagagaaatgtagattttagttcacatgaaactggagggtactggctacgttgtaattaatatattaatagtttgtcagtcttggtcattgtcttggtcagaggatgccataggaagctagatcagtcctgtaatttcttcctattttttttttttaaataaagccaattatttccatataagctaggtatgcactccatacctgtttgataagattgattacattaaacatttctcacaggaaaatgagtctatattttatgtttaattttaattttcactttgtagaaactaagttcagtgtgccgtgctgatccagtgaaagcatgtgcagtaatttcattgtaaccagttttcactttagatagtggccaggagatgtttgaaccgggttatgagtttgtgaggttttgagcatggttcttccttctttccctaggctggatagagtactatagcagggtattggatggtttcccaaagcaggataacttccagggaggaagcatcacagatgtctgaagttcagtggtataatgcacttttattactcctctgttcctggcctacaaatctgcagaaaagacatatgagggcatcaatactctccaagaaatagcatcttttttttacacccccttttttttttttcttttttgagatggagtctcactctgtcacccaggctggagtgcagtggtatgatctcggctcactgcaacctccgtctcctgggttcaagcgattctcctgcctcagcctcccgagtagctgggattacaggtgtgtgccaccacacccggttaatttgttatttttaggagagatggggttttgccatgttgaccaggcttgtctcaaactgctgacctcaggtgatctgcccgccttggccttccaaagtgctgggattacaggtgtgagtcaacacgcctggccgaaaatagcatcttcatccacttttatctaagcttaacatctattctgtttatggtgttgtcagagatttggggaactgggataatgagtttgtccatttcaactgttgattattttactaatggctatgaaagtgctatgatgttcagagcaggtcttttcacatttgatggataattttgggagcagggaagatagaccttatttccttgcttagagtttcatttcaaaacatggattttagatataggactgccagtttagcaaaataaaaatatgagacatgcagttaagtctgaattttagctagacaataaataattttagaatattagtatgtccaatatgtcatattgtttttactgcttattggaaattcaattttgactatacatcttctatttttatttggcaactttatttagatagtattttccataatgaagtgtcttactcctgtttctccatatatttccactcacagtaagtaaaggaatagaaactaacgaataaaattcatgtatgaaatatcaggggaaaaatacaaaattaaaataatttatattaaattaatagaaaatcaaagaaaatgccctttttctaaatgccagaatcatataaaatttgtattaggctatgtttattttatatgattaaacaaaatggtttagcaaatggcatttaataaacaaaagccagtttataacattagcataaacttcagaggattaaaaatttgttacagtgtctaagccatatttctggtgggtttctgtgatattctatgtggtctttgcattagttactacagagtatttttcggtgcaagttctggagggaaagttttctaagaaatgaacattcccattaaaggaatttcactcttcaattaatagaaagcatcatttgtttttcacatgatctgttgctatcggttcctttaaaatgtttgttagctttttaaacatctgttgctgtaagaagataaatcttacacacattacttgtgctgtgtgtttgccccagagtcaagtcaatgttttacatggcgcctagagatctgtgataacagctcactggctgtgttcctgcacgtcataatctaaccctttcccgtatcctgatctcttccttcctgaccatcctcaccatcctcagctcagtggctctccccatttcctgttttgctcagaccctcaccagagccaagctctccagccaggtcttctccctacattcatcagccaccgccctccgtccgcccggctgcggcaattctgtcctacttttgcagcctgaaccctgagcagagaataacaaacctggaaactttcatagtgtcacccaaagtcacaccgcacacacatgtgcttggccacgtattcacacataatgatttttttttaatttaatgagggaattgttatgtaaatttggcaccatttctttttgttttatatggatggacatgagcacttaaagattaagaggttattttcggccggtcgcggtggctcacacctataatcccagcactttggcaggccaaggcaggtggatcacctgaggtcaggggttcgagaccaccgtggccaacatggtgaaacctcatctctactaaaaataccaaaaattagccgggcttagtggcagacacctataatcccagctactcaggaggctgagacaggagaatcgcttgaacccgggaggcagaggttgcagtgaaccgagatcgcgccactgcactccagcctggtcaacaagagtgaaactccttctcaaaaacaaaaaacaaacaaacaaaaaaacccaaagaggttattttcaaacttgcatagtcacacgtcaaggcaggaacccaagccctgccatcaaatcaaagttttgagatttaagttcttcctctgtaatacaggatcgtatggtcccagagttaaaatagaacttaaaatacctagctgaagtgcttatagttatcagaaaatgtttgtttcttccctgcaattttcactaaagtgaagaagacgtgtgagagacaatttgtgagacctaattctggttgaggctaagaattccattcgttttccagtcactgacaaatttatttaactcttttgcttttggacatgtttctttgtcacacaaggttgttctgtgattatatgtttctataatcttttcagtttaaaatttgacttaataattagcatatagcaagtcaagaattttttttttttgcaagtcaacaattttcaaatgaataaatgcatgagtaaatggtggtatcccttgctttactacaaataatacaaaatattttgcaattgtttaatgacacatttgagagtgacataggtattttattgtttctgtggatttttgtttgtttgtttttctagatggagtctcgctctgccgcccaggctggagtgcagtggcgctatctcagctcactgcaggccccgcctcccgggttcacgccattctcctgcctcagcctcctgagtagctgggactacatgcgcccgccaccacgcctggctaattttttgtattggtagagacggggtttcaccgttctgtgggtattttaaagtaaactctaggacatttttaagtagttggatttttaaaaattgtcccacatactaagttacattttttacacagttgcagcacagtacttacctttgatcctcgtttgagcctctggctttctttagcctgcttaagctctgtcctctctctctttactcttctattcaaagagtagtatgtattttgtaaagattttgtaatcttgcctactaataaagtttacattcctcagcaggagagtaaggaactttacaatctgcttccaatgcaccaacataaactcgtatcaggctgtctcttcatctcctgtgtccaccatttcccagcccctacgtgtacaccactactttatatttcactcacactggggctccatgcaccaacgtagcacatgagcagtggtgtgtagcagaaggcaagaaagtccataagcgtaggctttggaatgaggcaatcagagctcaaatgtagctgtagctgtatcattttgtagctacacggctatctctgtctccatcaacctcacttgttttacctatgactaaaataatatgccgggcacggtggctcacgcctgtagtcccagcactttgggaggccgaggagggcagatcacaaggtcaggagatcgggatcatcctggctaacacggtgaaaccccatctttactaaaaatacaaaaaattagccgggcgcggtggcgggcgcctgaagtcccagctactcgggaggctgaggcaggagaatggcgtgaacctgggaggcggagcttgcagtgagccgagatcgcgccactgcactccagcctgggcgacagagcgagactccgtctcaaaaaaaaaaaaaaaaaaaaaaaaaaaaaaaaagataataacacagtatagagctcctataggattaaatgatataacataatttaaattatgttatgaagtgtttggtacagggaaggcaataagtgtaagctattgtgatacaataaagatggacatgaaagtttttgcttattttggttattctgtctaaaaaggtttgaattacttttatttgtggcaaaattgcataatctttgagatctgctaacctttatattcacattaaaatgtaattaataatgattatgttgcatgccactctcttatttcttagttgacattgtatcttttcctagtctgacttttctccagattaacactttaaaaaaagtcatacgcaatcagagtaaagggaatttgtcagtcatttactccaatatcctcatctaataattaacaaaactgaagttcaaactcgttgataactaacatatttttgtgagattgttgtataatgtctgccttcgtagtagcctgtgaatttccaaaaagtagaaaaccacgtctgtgtgaatggcttagtatcaacaatgattgatatagggtgaactctcagtgatgaatatttctggaataagagaatgttgtggaactacttctggccagacttcttaattgtaggctggtgctttttgtgttatactatgtttcttttcactcaaacctcatcttgttttgcagattcacttattaaaaatctctcctgaaagtttttgtatatcctggagtggcccacataaaactgatcgttatgagatccaggaactctcctggttgtataatgtgatcacctgcttttggaggtctaatgatgcatacccccagagacagaccaaggaaaaagtaaagctgaagcaataacttatttatttacttacttacttacttactttttcctggctaagatgatctagacatgtggatcttctatccttggcatcaaatttggtgctcctttcttgtgtctaacaattaattgcttcaaccttaatttcacagtagtaccaattttgtgttaaccttggctgtctgcagactactttcattcttgttgcttatttctactctttagtaacccggagagaagcagaaaagtttataggacttgtgttctataaatgagggaactaaggctttgtctgaattcagataccctctctgccatcatactgtttttacgttgtgcagttttgcctcccttcactgggttggggctgccttagaactatggttgagctaaggatgaggtggcctccacctgtaatcccggcactttgggaggccaaggaatgtggatagcttgaggtcaggagttcgagaccagcataggcaacatcgtgaaaccctgtctctactaaaaatacaaaaactagctgggtgtgatggtgcatgcctatagtcccacctacttgagagactgaggcaggagaagtgcttgaatctgggaggcagaggttgcaatgagccaagactgtgccactgtactccagcctgggcgacagaacaagactctgtcttaaaaaaaaaaaaaaaaaaaaaaaaaaggaaactgggcctcagtttggtcatctggaaaatgagccagatggtctctaaggttcttaccattaataagtctcttccaaaaatacaaaaaaattagctgggcatggtgccacacacctgtggtcctagctactctggaggctgaggtgggaggattgcttgagcccaggaagcaggtgttgtagtgagccaagatcatgccactgcattccagcctggacaacacagcaagactctgtcttaaaaataaataaataaataactatggctgagatattttaccacagtgaaagaaatctaaccattctccccgtaagttctagcaaagttcctagagcagccttgggctataggaccactgaattcccatgctaaagtccccccccacaccaccccccatggagtcctgaagttaaacagctggctagttcaaattgtggtttagggctgcaaggtctgtgtttagtaattagcacttgaacctagcaataaccttcaatgagtctctcattttcctgctctggggagagaaaaaatcaacaaatacagactaagtgtgctctagtgtcagatggtcagagtctggatcacttgttggatgtatggaactaaacaagttctttcatttctttgtacttcagatgcctcatctgcaaagcagtgtcaatctcaaagtttcttggaaagggtaaatgaaattataaatgtaatagcacggggcctgactcataggagtgctccgtaaatattagctcctaatcattattattattcagtacttggcaaaaatcaagttacagtttcatctaatctgagttgatcacatgcatatttttctttatttaaaaaaaatttctttacaaacatgaaataaatggggtggaatttactttcttcatttataactagatgatttcaattaatttgattttcagcaaaagcatctttatcagttttgaccatgttggaaactgaacacagcccatctggcattattggcaccacattggaaatgtatataatcttatggtgaaagtacaattacaagtgtaattctgtcttgacgtttgcttgaaattcatctcttttgggttatatgttaataatgagggcggaaatttgctgtgagcatttacatttgatctagacacaggctaatattgtttgcctgcaatatatttaacattccaaaactgctttctgatttatcttatgtatcttaaaacttacagctattaattcttctcatttttccactaaagctagcataccacaaagcaaaatatgaatatattctataagttgtagaatttcttaagatttatctctaccattggatgaggcatcataggcccttttcctcaaggaagtggaaaatattctgtgccagtagttgtcagtaaaagaggatatctgtccctaaagtttatttcatatgaatattaatattccttatatggccatcattttcagtgtttcattttccaaatgcactttctaaaaacatgttaaattatggtccattactaaccactaatggatgattttatgactgaattctgcaccaaaaatgattatttgctgtgtgaggacagatttgcaaaacaagatgtggtagcatttaaacggccacttatttttagtagaagactgccctgactgtggcctaaaacttagatttccatttcatggcatcattatcttcagacccagatgggcgtctcttgcacttaaggagcatgaggaaaaccaatttgattaaaataagctgtttcgtatcattaggaaatttggagatggaaaaataaagatttgtgtaataaatgtatgatctgaagccacgttcatcctccaaggtaattagcaattctgtatttgcaggaaccaggaaggcaacagatttttcttcaggatgctctttttgtggaaaattgtgggtataatacttgatgggtcaaactgaacaaagtgaactatttgatttatggtgtgaatattatgagaattattctgtagttcatttcttcccatcaattcatgaaatcaatcttttaagcttattttgcaatcaaaattcctaaaaaaaaaacctaaggatcttatcttataataacatcacaattctttctatattattttcattcaatatactgcatatctagatccattaaagtaattttaaaaatttcttctattgatatggctacagtctatttcaaatattggcacctgaagataattgtgaagtcagcaatgattcagcaaaacagaatttaaatagtgctgaaagcataaatagtacccaaggagatgtgggtcttttctaaaaaaatttaagatctaggatttacccatacttaaataaactttaagtatttattttttaactaatctccactcaaagctccttcaaacgctgtttccatgttgtttacagtgtaaatgaataggataatgaaaataactattaaataaaatagaggttaagtgacctgcctgcagccacagagttagttcatggctatgccaagaatcaaacttagattttctggtttgcccatgttcttttaactgctttttttgatgaagtcaaggctttgagataactgacctcaatacatagttcagtatctccgtttgtcagcacaaaatacacttcatgctattgtggtgtttagataaaatatacaaaatataaatgctaatgagatgcccaatatgtgatgatgaatcgcaaaaagcaatataatgtgacaaatatttattaaatagctaattctgtcaatataaatatttctgaggagagtattcttttcaccttcagaaagccgtataataccaacaatttatgaggggtgaaaccaatcaatggtaaaatactttcggatttttaaaaactaatttagtaattggcaatatattcaggaacattattaagttggtttttttgcatcacaaagattgaattctgctatttctgttgatagaacatgtactaaatgataacactgattaataagggtaagttaggtaatttttagaagtgcggttccaggaagaaaacttcctaaatgatggaagaaaaaaataagttaacttagatatttttctgtacaatttagaaacagacgaaccacagattacaaagcatgacttcatgatctctggaacaaggctatgacatgaggaatttaagaagctccccttacatacattgtatcagactcttgcccctccctccaggaccttgtgctgcctgttccattgcctgaaatatttatgtgacccaaagaagactgggtcttagatgttagattctccaagaatcctccccagactcccggtgtctgtgggaaggatggtccagtgcgccccttagagtctgtactttgtcagcctttgtcacaatataatcagcacatcgaatgctgtgggctgtttacctggcgtcatttcgctggagagacaacttcccaagaacaggaactgagtgtccagtggtctagctgtgtttcacccatagtaagtgatcaactctgattgaatgaagggatactcaagttaactagtccctgtgcaagtccctatagcgtagagtcacaggctctcttttgaagctctttactacactttatttcactcagatgacaggcaaggaaactgagactcaggcaggctaagagatcacacaccataaatggcagagtgaggaaatcaagcccattctctttccttgcttattctttcattcaacacatttatgctgagcatcctctatgtgtcagacattatgtcaaagctgagaatccaaagataaataggttaagatttcctgaagctccctgcctagtcagagatagactataaacagtaattataattcaatatgataagggctttgacagaaccatgtactctgtgctgtagaatttctaaagaaggaatcagtgtctgtgcatattaaatcgctccattttattttaatattcttttaatactcttttatgtctgactttagtatataactaccctcatttagaagaaggtaggcaaaggcctattcaatttaatgaaagtttaaatattgcaatgttatttctaaactaattagttttcatgattgttcatattgtacattaatttgaatatcaaacagaagtctaatagttttaagtggattgcttagaaaaattagtattgtcatttatataacttggaatccaaagaagattctctgaagagaatgatcataagcacattaccagagtagatgagtgaagaactggggtaggagtacactatggcatggagatggcttagggtgaatcaggaactagcaacacccttcgataaagcagctgtgtgcctgagttttgatcagaagttcatctgctgttgttaaagatcttttaaagaataactggatgaatagttattttacttctcatagttgcctggattaatagatttattttacttctcatagtttttaaattattcttcagacaaaagaaaatagccatggcagattatggcatttaataatggtaattcaaaatattttatcaaatgaatttaaaaaaaagtaaatgtcaataggcaacatcagtttatttccatttcttaataatcaccaagctattcaaaccgagagcaatgagaagctcataaaaaacaagccatgaacctaccaggaaattcgagggaggggatctccctttatcaatctgtgtatctccagtgctaagcacgatggcttatctcatatgtggttgaaaggcttcaaccacaacaagaagactcccaactgaagacttttttttttttttttttttttttttgggatggagtctctgtcgcctgggctggagtgcagtggcatgatctcggctcactgtaacctccagctcccaggttcatgcgattctcctgcctcagcctcccgagtagctgggattaccatgcccagctaatttttgtattttcaatagagaccgggtttggccatgctggccagactggtctctaactcctgacctcaagtgatccacccccctcggcctcccaaagtgctgggattataggcatgagccaacacgcccggcctaaaacttcgttctttaaaaataagtaaacaaaccaaaaattgaatagacataaaccaaataaggataaaagaaaactctgctttaaaagcctaattccaaaaacctatgagctgcaagtcatcagtgattaaaagctaggaggcacactggatgtttaaaagtagtacctgtgcccttctaaagcagccaaaccagtgaaaatgggtagaagccaataagggggcattcacccctttcaagcatctaaggaatgcacattcaacacattccaagcacacctcccccgctgcaggctgctcaggccagtggccttccacctctagccacattgcacaaaaattaataggaaaacaaaagagatgcctttctggatttgtcacattgcttcacactggtgcccctttctcttgtaatcaggataaagaaagtctctgccgggcggggtggctcgcgcctgtaatcccagcacttgggaggccaaggccggtggatcaccggaggccaggagttcaagaccagcctgaccaacatggcgaaaccctgtctctactgaaaacacaaaattaactgggcgtggtggtgcatgcctgtaatcccagctactcaggaggctggggcaggagaatcacatgaacctgggagctggaggttgcagtgagcagagatcacaccactgtactccagcttgggcaacaagagcaaaactccgtctcaaaaaacaaacaaacaaacaaacaaaacattgcagccccattgtgaaaagcaggaatgtgtgaacccaaaagttctgacaaaggaagtggacggggcagcaggcatagatgaggtagcccgtgtagaaaaactccagaatttgctaggtattttttttcttctggtcactatttagaattctttgcttaaactcccacttccaacttattgtatatatattgtcagctcaagaatggagaagaaggtgtttaactctagattagactacccaacctgtggtttagtagggtaaatagagttcataaacaaaaagccctgtccttaccagtgttcatcaaccacctgcttggactaattgtactatgtcactcgtttttactatacagatatctgtggatatctctccagaacttcatgtatatgtaagtgacttgctcccaattctttcacattttatcaatatcagctgtgttttgcttaaaaaatgagccttacctaactaaaatttctactgtaataaagcaagttaattgtagtgaaatctaattatctgtttactatgatttcattataaatcttgtgggtttttttttcttacattgtccttatgtattagcacctgtggtaagatatattgatcacagtttcatcagataggcatactgcttcaatattgtttgaaaaaaatctttatctttcagcttcatattctaggaggaaccaaatgtaacatttacttttcattttgattgcatattaacttgaggtcataatcttgctttaacaatccatctcttctaattatagatataggaggtatggaagtatgtgtttgccacagaacaaaccctggatatatttccatcttgcttataaaacttgtctttatgtaaatgtttaaataagatattttaggataaatggtttttatcattgcctattatgtcattttctattaaaagtgaattttatacttaattgactctgattcttaaggcattaaattctagtccattcttcttatgagatagggttagtaaaataagttagttttatgggatcaaaagctacaaacaggctgggcatgctggctcatacctgtaatgcctgcactttgggagactaaggcaggaggatcgcttgaggctagaagtttgagaccagccagtgcaatatagcaagacccctgtctctataaagaaaaaaaatcaagtaaaaatatctagaaatatactttccccaaaatgtgtatatttccttatgccattctgccaattaaaaattgtcagttcctggatgttacttggatggtgttttcctaatactaaagctacttattctaggcatttgtgagttttatcattctcaggaagaataaattaactcaagtgtcttgcctttactaataatctatagaagatataatacattacaaaacgagatcttcaaaggcaatttatctatgtctgtgggtcagcggagagacatcaagagttaggagggagtgtacctgtaacattctgaataagattttgatgttaaaaccaatgtggcttgttagtccgatatgtcccctctatgccactaaagatggtgcctactccttaccactcatacttgccatattctttacccatttttacttgactttgtaccccaaagttcctcttgtgggctatgtgtggaatgtgatggcttttaaaaacataaattggggaacaagtgtgaaaataaatatatggacaacattttaaatattctaaatattataatttaaacatcaaaagagttattgtatatgttcaagattgaaagttaaaaagtgaatataaaattctaaataataataactatttcaacatgaacctaaaactgtgcctgttgaacagtgcatagaatattaaatagaattagtaaagagttacttgagtagtgaattacatcctgcattgtcagcctatgatatctatgtccatatattttgtagcctagattcataaaatgtatattttttaaaatcttaacacttttcatcaaatggaatgatttgtttttaatttgattatggatcaatttttaatttgattctagagcctacttaatcattgctttaggttcttaaatttcttttatagaacataggtgagcagatttttagggtttccttttagatggttctgaggtttctgtccatgttcaatactatgagtttataactttacaatattcttttgtcacttgcctaaaagcaggtttgttatttttctttttctcaaggaaagctttagagagagaatctagatcttttaaatttgaaaggcattcatgatacccagttacttcctctaatgattgactactgttgtgaaacctaatgttaatatttaagaagtggaaaattatggattgtattgtaaaatagtcaattaaaagaaaagtatttttgtgtgtgggaatctagcaactttcatcccataatccttaaatcaagtttaatgtatactaaaaatatcaagttttactttgaactattaagattaatacaagactcccatgttttttcagattttcccaatcttcaatgttctaagggatttactctgagactacttaaaccttaacatttttgatgttctcatttactcactggctgttaaaatctcaaaccttgtgcatcaatactaggagctcttacttaaaatgattaattgtaatgttttcaacagtgagcactaatgtttttccttgggggaaaaaaaatcttccttatatgtttatgtggttctcttgcctctgtagttgacttagattaatttctttgctaattttcttgttcagttggataaaagaaagcttcgggctttgtatttcttgaaaaccaagaaaagtaagtattacacataagaaaatatccaattttaccacttcttcccttgggcagttgacccgtgtgcacatgtgcatgcatagcaatcttttgcaatgaactcagtttatatatgagatctgtttttcagtattgtagaaagatatctaatctatttgaaaatacattgtcagcacctagtgttccaaaacatagattgaatttagtgtgggaataccgcatagtattggaagaaaagtaattaaaatcatttagaaattgttttgaagaatgcattgctgcaaggtgtcatagccatataaacatgacaccaccatcttatggaatgtacagaaaaggggtgtctcttgtgccaaataaacattctttaattaacgcttcacaatatgtagtgtgaactttcctagtctgtgtttatccctcctggggctgctacttttaatgcctcaaaaactgttgcctgtatatattctctttctgctggatcttgggatgaagaattgattacaggtgcattttctccttgaatctgtctaataagctgaactaaaactacactaatacaagaaagcaacaagaaaggtcttcttatgatgaattagttgtgcttatatacatataagagttagtgagggccacaagaataaactggcacaataaactatttgtatttgaacactactatttgtattttaatataataattactttgaattccataattaatatacctatacgtgaaacgttttccgctcagcaaagtcatagactttggggggaaaatgttattttattttattgtgagggtttgaataggcattttgctattcattatctatttgcagggaaatgacaagttttcaaaatgaaacagtctttgttacctgtctcttttgaaagacttactctcatgttgtttatttaattgttttgttggcattaatcttgcttttttttaaataatgcatattccttttaattatgtctacttatttaaataaaacttttaaattgtgaatagctatgaatcaccatatccatataactagaatatgaaaatcttaaaaaattaatgtgctgataattataatattcctgtttcttgcatttgttttacattaatacacattctgaaaaagaggaaatgcttatcttgggagtggcttaagttgttttgggcactttttctcagtgatagtcatatattttggagcagccaaaattcatatctctttgccagtgtacagacccaaaatgtcaagttattatgcactagtagaaggacatattttcttcacactttattaattaatctatttcgtgaatttttcttttcaaatgtctatcactgtaattatctttgcttataccaaattcagtttcactggattacttagaatgctgatattcaaatagttttttgaagctcagatttcaggctttgttcagttctacttacagtatttattacgattaatcattattccacctgcctctgagcaccttttacctagtagtagcagaggtgagtccagtctcgtgcaggaagaacaaggatgtgtttggcaggtaagctgattagtgagtctacatcaagtgattgagtcaacagttcataccaacatagctagagcaatgctttttgaactatgggcagctgtccttcctcttgatgcatgcctctttaatcatttccagcattttcttttccatttgttattttcaccagggaagagagagccttataatattagtctgttatgttagctttccatagatgtacacattatttaaatcatatgtaaattagatccatccttcaataaaaattttaaaactagtaaatcatctcctaataatttttcaaaatttaaattactgttaatttcagataaggctaataggcaatggttttcttgttctacaatactcttaacctagaactaagccatgttctctaataaccagatctcaaggtatatgaattttctttcattattggaaacatggttagagtgacctaaagctccaacttattattacatacatggaacccaatctagctagttctttcttatttaaattatctttccttagagccctttcattgttcctcttggggaggacttaaaggttttcttggttctagtcacaatcagaaaatatataatgaattttttacatataaggtgaaagaagtagaggtacattattgcttgaaaacaaggtgtagcacatttttaaaaattactatgttaaatagaatcagcatatgtaaacagaacaccagctaaactacccccacctaaactttaaatgaagacaactgagtaaaatgagtaagatgttttctgacgtaatcactgaagtctcaaaggaaaacaggacagtcacaaaattaccaggtctgatgagttaactacttaaaagtgtgattaaaagccaatggaaatgataggaatggcagcaaaaaagcatcctgaatgtagaaatagaggtacattcaactggccaactggagtaggatttctgttatccaaggctgcgttaagtgattaagaatgcacactagaaggcatggttttcacattatctcaacacatctgctcagtggatgagtagtggatgatatggaggttgtctggtaatcttaaatggaagaggatataagccatgaaacaggagagtgaggaatgtgatagaaatatgtttgaacctcacatgttgttaagttctgaagcccttaggaatttcatcttttaaaattattattatgttccattgttatttctcctcaagaatagactgtgacttttctttcttatcttcatatttttaaaaatagtctctaacacgttttgtacaaaatctctaaggaaattttagggtttctttaaattcttaactcagtatttttcaaggcaaaccattccgaataaaggaacacaacatttctgacatatttgaagtatgtaaaaactctaaattacgtggatcctaatgaatcatagttgcagtttaggtagctatcctaaaaattaggaaggtcaaatactacctctttgtttggaaattccacctccgtgatttgttcatgatagcctttttgtgagaagggttttgactgtaaagaatgaatgaatgagtaagcagtttttattaaacaagctcaactttgttctgttgctgctgtctctttgttgttgtaatgtatgcttctaattcacgcaataccaacatgttttccctctcttcaagaaacaagctttactaaaatactttcacttctaaacaacgtgatacatatatttgaaattttctttgagttaatagaggcctactttagagtgttgtctagaatattgataaaaatctttttaagtatcctcaaagctgcctgaacaggggatgaagggtagtcagaaatagaaatatgccttctattttctcatactatttattgagtattttctaaataataaagggggaaagaagatataaatattatccaaaagaaatacgaaggagaaatgcttgacgtgatggataccctgtttaccctgatgtgattacacagtgcatgcctatgtcaaaatatttcctgtaatccataaatatatatacctactatgtacccataaaaattaaaaactaaacaaatttttccaaggtatatgggcgtatactttcactttacagttgtagaagttggatgcctgaggtttggataaattactgctttcacaagtcagattcctttaaaactggttggggattttgagaatgcatccaatgtatctgctcctgctctagtgaagaagtcctcggctgctgctactcaggacaaaatcatcatggtgcatggaagaaaccagtaaaaggacccgtaaatattagatttttctgacttgttcacttgcctcttcctccttcccataagtgtactcttttttttagggtctatgtgcaagcagttttttttaaatataatcataaaagttgctttttcaaaggagtctaaaatgcatttcatatttgtcattgttttctttaaatctagaactcttttggaagggatatgtaacttgagatggcattgttatagtttggaaactgtattcatctgcttcttcaactcaaaataacagtgccttcagatcctgaaaacttaactacttgtctttatttatttttaccccactacagcttatgtaccgtaatcaataggagttcagactttatcctcgtttttgctgcatttcacatcttcaaaaatcaacaactctgtcaaagaattccagacacataaagccaagtttaagaaatagtcatgaattgggatttttttttctccatttaacaaaatttactttaaaaatagcagggaaaataactccaaatcaatctgttacaaggaaatgttattttatgtttgtatggcgctttttgttttcaatggttttaaagttgcaaaattgatgttccattccacggtggtagtgtaatgcattttcaaaggaagaaaccgaagccttgaggtgttaagtatcctgtctgtagttgcacaatgaacatggcagagagaaaattagaactcagtttctaagttttgttttctttcatctgtctctctttcacatattaaattctcaaattagaagtgtgatgtgctttcaaatttaatttagacccctaaaaaatactttttctgtgatacatttatgcttacttttctatagtctaagtgattattttcaaaaagtttaaaaaagtagttagaaatatgaatgacccaggaatgcaaaaagaagcctccagactgatagattttattctggtaaaactaaaacgctcctggaagttttgttataaatttttttccaagaactgactttattcctctggaaatgacatcatgatgtatcactaagtggtctactttgtcatgaaacttgagactaccacatgggatagaatatttaagttcctgaacttcttaatgacttaagttttcttgaacattaaggtattcagtgactactctcacaggcttactagataatgaaaagtctaatctttagctgaatcttcagtcatataatgtgtagtcagataagaagtgaatagacaacacaatagttaagtaatgagccaatggaaaaatgaatgaatgaaactgacaagcaaagacttgaatgaattcatattagatattatggttttatgcttgatacattatagaattcaaataaaaatggaaaatatctctaggatatcaattattcagttatgccaaagttattcagctgctttaaatcattataaccttctcacttctacagtgttatacaaaggagagaattcaaatagaggaaaaagacacatggaaaaaagtattcattttaacactatacatttgatccccaatatttttggggggtgggggggacggagtctcactccgttgcccaggctggagtgcagtggcactatctcggctcactgcaacctctgcctcccaggttcaagccattctcctgcctcagcctcctgagtagctgagactgcaggatcgtgccaccacacccggctgattttttgtatttttagtagagacggtgtttcaccatgttagccaggatggtctcgatctcctgacctcatgatccacccgcctcggcctcccaaagtgctgggattatgggcgtgagccactgtgcctggccatgttcccaaatttgaagccttagagattctcaacatttgcgaattcgttaaacaaatacattcctgagatgaaatttttcacagctacttaaaatattgattagtccaatagtaacataaaagaaagaacatgagctttgagatcagaaaaacctatatttgcgtcctctgtcacttgcaaaatgttccaaatataaagaaactcctggaatctgtgcgcactgttagtttctttgtagaatcctctctgacctgacacagactacttatcctatggtgtactgagatttaacactgtgcttgcagagagaccaatttaattttgggaggtaatctgactgaagacttaagaaaggaatgaatggaatcagataggccacaatcaaattctggccacttactagtggtaacacattgggtacattacttctttgaagctcagatttcttgtcaataaattgctaacaattaaatactgtttacccagtggatgataaaatgccattatatgtactagcaccgagctaggtatggatttggtattaactacatagtaattgttagcattgttgttgtgtgtcttatgctaatctaaaacttttactcaaaaagattttagtcggtcatttatgcccaaagtattacttcttagtacaccaaacaccctgtctgaccaaacccccaatccaactgcctggccatttttcctagtaacattccttgtataagccagcatttttgcagttctagtcatttcccccaaactgtgtgaattcccagcctgagcctttcctcctgctcagcccacagactatgtcttttctccctcttctagattttcctgttgaacagtccttttccttcaaggtttaactcaagtggagcttcctgctggaagccttctataaagcactcagtatttactgtctttttctcctgtgcttttatagcactttgcatttgatagaatgcttcacactttccatagatcataatttctatatctgactctctaccatatattaaacttcttgaagacagaagctatttttcccttcatttttgtaattcttttagcaacttggtaacttgtgctcagtggatatttataaaatatatgtcaaattaaattcaagtgactgaaagctctagaaataaccttgtgtaacccttcttgacacagatgtgccatttgaagtgcccatttgaatatgattttttaaatttttacatattgaattttcacatacataaagttggttctaaaaggctaaaagtactggtatacttgacacagaatctctcccccctcacatttcattttaatttattgcacagatagaaaactaatgggtacaattatatggatataatctttccatctgggctagttcatgaacaaagcatattaggtaatttacaagctatatcctggcttgcttaaaacagtatctgtaacattttgggaaattttactagttcaagagagggagagataagtgaattgatttacatggtcgatttggaagacttatggatcctctggaaagaaaataaactcaagagttttcaaatataatgtcttacaattctctctttagaaaggaagaaattgtagttctttaaaactgattaactatgaggatggtaagactgggggaaaggataggccaaaacttggcctgaacacgagtgtcagctgatcttgaaagagtttctaattttagtgtaattaaaataaaaatttttaatagcttcacctattgccacataatattaattaggcctccaaagacaagaaaagctcctctatgaaccacttttacgggaatctctgtgccctcttagagtttcaagtgtgcgacttgaaagatttaaactacaaaattctgtgtgtatgtgtgtgtctctctctctgtctctctttctctctctatgtgtgtgtgtctgtctctcacacagacacacacacagacacaaacacacacacacacacacgtaattttctcccaaaaaatttacacccaaattaatggcgtgttcctttttgacaaagactttggctaaaccctcttgtaaaacattctaaaatggctagtgatatctacctactgacaaggagtcagtgtaatcaataacccaatcaaacactcaaaatgcttaactataatcttaggatttttaaatatcctgatcattttcacttggtacttcatattgaatgaatatcaccaagatccaacttgataggctgggcgcagtggctcacgcctgtaaatcacagcactttgggaggccgaggcgggcagatcacgggaggtcaggactttgagacaagcctggccaacatggtgaaaccctgcctctactaaaaatacaaaaattagctgggcgtggtggcaggcgcatgtaatcccagctactgggaggctgaggcaggaagtcacttgaacccggtaggcggagatcgcagtaagccgagttctagccactgcatttcagtctgggcaacagagagagactccgtctcaaaaaacaaaacaaaacaaaacaaaacaaaaaaaacaaagatccaacttgatttaaaaaaaaaaaaaaaaggtggggctggggctggactggccgggcgcagtggctcacgcctgtaatcccggcactttgggagaccgaggtgggtggataaccaggtcaggagatcgagaccatcctggccaacatgatgaaaccccgtctctactgaaaatgcaaaaattagctgggcatggtggctggtgcttgtaatcccagctactcgggaggctgaggcagaacccgggaggcggagcttgcagtgagctgagatagtgccactgcactccatcctggagacggagctagactccgtctcaaaaaaaaagtggctggacttgccagagttgggttggcaaagaaaacccatccaattttaaaatgatcaaggtcattgtagactttgaaaaatctttatttctgtttgtatacaatggtgaacttaaacaattcgtgagaattttgcaagtcagtataagctccaattctccttcttcagaaatggagaagaacttttttaatattacatatttttctttaaataataaagagacaaattaattcctattaaatcttaatttggaagtattgtttgattgtggaagattctagaatgcatgttaagaatctgattttgtctatgagctccttccctgtttccatggttctctccagttctaccttccaatattctcatcatgttatactttatccaaaaagactaaacttttcacccttctctgaatatacattttcattactttccaccaaactacttttaaatatctaaaattctaccactttccaaggagacttatgtgctattacaaacaaaataggcctataaacaaataactaatataaatgaaagctgccttaatcattacaaaaccattattaggattaaaaagcccttactaaatagtaatcaaacataattttagagctagtttaatggcaattatatttcaatacatactttaaaaatgtatgttgtgtctctttaacacctagctctaagaaattaaaattattattatcacaatattttatatatatgactaacaaaaaactcgcaatattaataaaatgccatgtttctctactctttaaaaagagttaagctaatatcaatgtactaagtaataagagtaaaatatgtttgcaaatggacatggaatattcacctatgttagaactttctccttcagtctaccagctcaaatctatatgagaaacctatttttagttcttgtaaaagaataaagcctggcacccatttttagtttagcaagctcatagtgacacatagagcatttttctatagcgttttcatagcatatgttgtatggatcacatactaaatatttattttgtaatttacagtctagaggaattatgaaaaaagaaactgggtaaaaaatattagatcaaactttgataataataagtttaagtaagaaactaacttttgaaatttacatgttagctgggcatatttcaagatatcatctgttgggaaacacctaaaacaagttgttttctagtaagatttaccccccaccgcccccgttttttttcttttagctgaattgttatgtttttttctgaacaagtatttgtgtgacagtttctactgctactggttcagctgacattctatcataaataataaaaattcttggatatttttactcttacaaatatagtaaatcttcacttatattaatatatgtaaattgtacatatataatatatgtaaattgtacatatataatatatgtaaattgtacatatataatatatgtaaattgtacatatataatatatgtaaattgtacatatataatatatgtaaattgtacatatataatatatgtaaattgtacatatatatgtaaattgtacatatataagatatgtaaattgtacatatattatatatgtaaattgtacatatataatatatgtaaattgcacatatataatatatgtaaattgtacatatataatatatgtaaattgtacatatataatatatgtaaattgcacatatattatatgtgtaaattgtacatatataatatgtgtaaattgtacatatataatatatgtaaattgtcatatgttacagatgctttagaaacattgtatatttgaataactatacatcacaggaccacagaattctggaatacgtgtgaattaaaatcattaaaatgtttataaactgaaaactcagtcatgtgaatttacttatgaagaataccttaatatcacagtagagaacagagtatgggagatgtttaattttagtccagttttaaaacaatgatatgtttaactggctgcttacttttaaatgatatattcataaagtttagcaatgttcattcacaaattttccctgtaaatttaactttccctgcactaatcaacaatataagttagtagactctagttacttctggattgcttggttcatatcttaaaaaggagagatttttttaaatggtgtttactcagaaagtaatgacatcttttaagggagaaaatttggcattttacatttcagaagcaacagtattggcagatgtatatcaggattttaaaaattccttgcaaaaatatgcatattccagccagctggaaacaacatgagacctttattctacgggagatctagagaggttgtgtgcctctctagatccccttcctccatatcctacagtgagttaataaccagtggtgggcaagaatgcagatcacctgccttttgggtaggtgtaatttttcattaccttgaaagtcttaaaggtaatcctcgaatatcgaatactttattatttattaaatcacatttctaactgttccagaccatgtttctatagcctgtgtacacagtgattgacacataaaaatcagtcacatttaacaagtgcatgaacttaaacatctttatatgaatttaatatctaattgtgaattgctactcactatgtgatcgccatctgtcattcagcatgaactgagaactatacattatcactatttattggttcaatctttttcaaggcacaatgcctaaggaagttactgattattgatccaccgtaattgaaatgcccacacatttgaaaaaagatggttaatgaaaataacttgtttccctgtatattgatttaactaaagaaagtaaaacgcatttgtgattcgcttgtacattgttttctaaccacaataaaaactgacttgagaagtttgtcagacgtatatatttatttcacaaataggtatctttttgatggcttttgtgaagaaaatgatgcattggaattgatatattgtgcataatataaatgccaataatacacttattcttctagatttttatttattctaagtttatccaattattatgtagggctgtttacatcaaagattgactgcctctggttttgctctggggagtcttagcttttgccctatgtacagctctgtgcttctaaggcagagcaaaagttgttggtgctcgtgggtttctctccttcttgtgccagaatcacttccctgcaagactgcttatggaacattcctaacccacatttgtttctcccaggactctggctcctttgagggatttgccggcctagctggatggaggtattccagctctgctttctttcagataatatttctattcattttatctaaataaaggattatattagctaaaaacgattgaacttgagatatgagtaggtacctttctagtatctggttttgttacaggttcttatggttgattttctgcctgtaatgtagtattttaatagaaccgtctttaaatagcaacaactcctaggaaaaagtttcgaggaaacctatgcaagctttttgaaagaaattggcatttaagtgcttaattcagttagcaactcataaagtctatattgactgggatgcaaatagcctttataagcattaatttcatgacatgaacattttgtagaagtgaatgtagagtttgtagatccttaggcaaatcttcactgtcagttgaatttatttaaagagcttttctggtcacctttgaacctcaatgatttctccagatgtacagaagtgaacaatgtaaaaatcttgctgtttcagcagaactgattccagctggctgggaactggatctgcaagtcattggttacagctgtgtttcgatttatgtgatggttgaaaaaataaattacccgattagatggctggaaagaggactctttgtttagcccttgtgtggggactgaaagtgtttatggtgctgttttctacgcagtctttgcaaagtaagctggacaaatagacttattcaatgcttctaagaaatgttgcatattcagctttaattcttctactaaagaaactgtatttttttatagtgctgtcatccagcaaatgttttaaaggtctagcatttaagagaagcagtacgttttctgtcctactgagcactgcatttagtaattgaaaagcagttttcttttgtttaatgtgtactttaaaacatgtctttgtcaggcacgggaatgggaatacattttctcttaaactcaatactttataatagcaaagtatctgaacataagttctaacttaacccttttcctcagtgagttatggctagtgtcacataagagaaaatacattaattaaattgctgtataaagaaatatagtcaaacattactgtaaaaaattaacatgcctgtgggccacttaggctattaggcttttgaatttgtgaatgttttatttgttataaaagtaaagttttgtatggagagtttggaagagcgttaatcagcatataactttccaggctagtaaaagtcaaaatgctaactcttggagctttggtatacagagcctaacaaaatacctccccaaagagactaatatactaacactatcttgtgtgaggagttttttgtttgttctattgcattatttttttaaggtaacttaacttggatcattctgtttcctaagttataagctgtcagaaccaatgaattgtttacagctcacccagttccactgtggcattaaaaaagtgagcggtggctctggaacagatagctacgatgatatgtcttcatcattattttctcaaacactgatttgctaaatgatttcaatattttttggaaatttatttttttctttaatgctttctaaactcctgaaaagggcccacattcttcagtgaacttgagactgaggccaagcacttgactaggtgtcacaaggtctcctaagttcagtagcagttcagtgtggggaacacccaggaatgtgttatattttccaagaaaatagacaattctttgctatttcctttcttaaacagctatatattatggaatttaaagatgcagaataaataagcataatatatctaataggagacaaaggtgggattgatctgtcttgaattgaaagtcagttttgctatgttacgctattttcttgatcaatgaaagtataccttctaacccttaacaaaatcaatacaattgattggaaaagatagaacaaagcatgagaatgcagaatacacttgaaccttcattattcagaaatatttaaatgatgtttataatgcttagaagcattttccactaactccatgtaatggaagcttctttaaccaagattgaagacctgagtaatagagtttgagaatatgctatagtggcatccttcatagaataacatggtttttgttttttttttttaagttaaactcatctcacattacttatacttctaaaagtgagagcaatttctattactgagcatagagatagcaaagtgaaattcaatcttgaaaataaagtatataaattaatatgaaaaacttagaaaagaaaaaagtatctataaagagagagcactttttaatttaaaataatttactctatattttgtgctcctgctaactgtcataattagtagataaagcattttcttttcttatgaaaagaaccctacaaaattagcatattttttacatgaaagaaaactctaaaaatctagaataaaaatgattatacacagtcagtataataccaatccattaataactttattccccttcaattaaggagcacttgaaaaatgaatattttttgaaaccaaaaaagatgtttttaaagtttttgcaagttgatagagaatttttaacctatgattcacctgtttttctggtttcctttgtattccaaatttcagaaatccacttaaggaggttttataaactatatatcttatcctgacaaattttaaatgccttattaaagctaaagtgtgtctattagatcaatgaatcctaaaatgtttttttaatccacattggctaatttttgcagtcatccaatgaaattatgaggttttctccccagtgcctatgccataactgtgtttacacatttttaaatcttagaaaattactatctagttataaaatgaaaatactttatatagtatttcaaataattaaaaatttcagtgggaataaagtaatctacataaaagatctagtataacattttgaagttgccatattatgcagctaatgtgaaatggtacaattttttttttttttttttttttgagatggagtctcactctgttgcccaggctagagtgcagtggcctgatctcggctcggtgcaacctctgcctcctggctcaagcaattctcctgtttcagcctcctgaatatctgggactacaggcgcacaccacaacgcccagctaatttttgtatttttagtagagatggggtttcaccatattggtcagactggtctcgaactcctgacctcaggtgattgacctgcctcagcctcccaaagtgctgcaattacaggaatgagccaccacgcctggcctgagatcatacacatttttgaaattcagctactaggtgagataccacagggatataggaagaggctatgttattagctttactggggataaatgttactggacagttattatgagggttaaattagataattatgtaaacagatatctaaatagcagatagtaattaccaggatgtgtttccaattgtactgtccttccattgcacaggatttagggctaaattgggctttggagataacctagtcctctctcctcattttaaaaataagagaacttaggttccaagagttaaatgacttatccaagatgatagacattattaattacagaattggcactagaaccagtttttctcactcttagatcagttatttttctactttctcacttcgtttcatggtgttgtacatggcctaccatatggaaaatagtacttttctatagttacgttacttaaaacataaatttttattgatcctgtaccataatattcacagtctaaatacaacagtgattctgaagtcatttgaaggcttctcacttatattcattcttaaaaagccaggattaattattttctctctcacctgttaggaagcacatcaacccagcagaaacattacttattagtatgtacaatatggagaactattgaaaaatactcttccagatttgtgtgtgtatatatatatatatttttttattttatttatttatttttttgagacagaatctcgctctgttacccagggtggcgtgatctcggctcactgcagcatctgcctcctgagttcaagcaattctcctgcctcagcctctagagtagctgtaactacaggtgtgcaccaacaagctcggctaatttttatatttttagtaggatgggttttcaccatgttggccaggctggtcttgagctccttacctcaggtgatccacccgcctctgcctcccaaagtgctgggattacaggagtgagccaccgtgcctggcctcagatttgtatataatttgttagggtataatttttgtggtctccaaattgccccttattatcattccctgccttttccctgaaagagaaacactccaccagcatcctcaagacctagttgttcctatgtgtggttgcacaacaaagttcacatcacttttaactcaagaccttcctcaagttcctcttcttgctctgttccctcatctcagtgtcatctctgtagtgtgctttgaatgaggtccccttgtggatactggtgactaacagactagactggaaagtaggttgtacacttccggagagcagaagaggggagagggcaagaggaaagaaaacagggaagggaagccatgaaaaagagattgctacaatgaattacaacttttttgtattactaaatgcaagaatgaacattagatttttacatgccaggatcattcctaaaaggaggagaaatctctgattatttgtttttccatggtagttgtgatattctacacttacatatatcaaaagaaagagaaagaaagtaatttcaggttggcaaacctattgcatcctggtcataaagtgcctgaatttaacactgagtcattttcttgtccaaatacaaaaatcttgaaagaaaatataggtcaagttttttttttccttgttaaaaaccaatgatctctttcatcgtgaaccttttaaagtaataactcatataaatttacattttacattatttaatttggcttaaaataattattagttctagaatctgatttgtaaatcaaaattgtcataccaaggtacacacacacacacacacacacacacacacactcacaaacacactcgtatcatctgggattttttctcagttaattctgtagaaaattcctaaccagggctgggagtggtggctcatgcctgtaatcccagcactttgggaggacgaggtgggcagaccacaaggtcaggagttcgagaccagcctggccaacatggtgaaacccccgtctcaactaaaaatacaaaaattagacagtcatggtggcatgctcctgtaatcccagctactcacgaggctgaggcaggagaatcacttgaacccgggaagctgaggttgcagtgagccagatcgtgccattgcactccagcctgggcgacagagcaactttccatctgaaaaacaaaaacagaaaaaaagaaaattcccaaccagttcatcctagtccacaagaatctgatttttgtctcccttgtcctttaattactcttccttgtctcctaaaaaaaaaacaaaaaaaaaaaacaaaaaaacagttttgtatgctcctaactgctgattgctccttattttaactggatttttagaaaagacttttttttttttgaatttttgctactcacactactattacatcacttctttattgaaagcagaaatatgtaatatgtgttgtttggctctaaaaagagaatgactgtcatttctggaaaagttagacaagtaaacacctcatatttattcggagactttagcttgagtagtttttttgtgtcttctgatagtattgttatcaactatttcaaagttagtatctatataccctttttccttaagtaatcatgcatatttccagactattagtaaataaaaataatagatactcttcagtcaaaagaaattctattttagatcttcaaataaatcaacatagtttcattctcttaaaagagacttgaaagaaaatattgagatcccataatcaattatgctataaaacttttcacaaggaaaatttaagtcaacagtctcctataaaactttctgcagggttggaaatgttttatatccaggctgttcaaaatggtatccaccaccatgtgcccttctacacatttgaaatatggctagggcaacagaaaaaaaaatgaattttcactttaatttaaatttaaatagctacacgtggctggtcacagcttattggagaatgcaggttaagtaaaacaaagaaaaaatgcaagtaataaacaataaattctgcacatccatgaattttgagtcaaaatttgaactgtagttgattttttgtcttttgtcttctatccttcttactccaaatctcactaaataatttaaatatgatccccttcttagcactgatttcaaatggcgtttataagaaataaaagattcctgccttagtagtcaggtagaaggcaggttgtattaaagtatttcagagtagtcagttattacttcctttaactgaaaatattttttgacattaaattcatatctatcttacttattttttagaaagttaacagaacaaatctccaaaatcacaaaaatagttgatctagcaaggcaatacttgcattatactacttaaattaaatgtaaaacagcatcaaaattttactttgtaaatattttagccatagtcaaagtataaactctgatttagggatgcttttgtattgatgataagatgttaagaattagaagagaccttaaacctgtatatatgacagtggtaattggactaattgattgcaacatcttctttcaaataaatattgatttaatcaagtctgcattcccattggccttaacggaagtcctaccagaagcctgtgcactcggatctggctaacctctatctggatataaatattttaaatgcatggccattcagttctaagtatgaattttttggcgagtatttattcctcttgattttctaaattcctcagttaacattgttatgccttctgtaaagttaaggcctgtgtgtgtgtatatctctgtatgtaatagagagatagcatggattaggggaaaaaaaagttgtatttgcatttgttgtttctgattcacagagctaggagtgcagtgttcatgtggagtccacagagctggaatatcagtaggcagttgctgtaagcacatgttcaattattaaaatagtcaacattttatgtctgatagccatagcgaggtcatgacattaatttatccaaagtattgtgggcaactgtctagaaaaataaatagcataaaggacacagatgccagagaactaaaaaagaaaaaaaaaaaaaggtgggtctgagcaaagagagattaagagatgaccaatttatttaatccacatagaacaggaagaagtcagcaggtgtctcaacgttaatgacaagtattttaagctatgctgcacatgagttaatttttgctttagtttttcattagattctaagcttgttgaatactactcctattcttccatgtcagaaacttaatttcatattttattgttgcttcaatgcttagggattctttgctacctgtttctttctctcctttttcattcttcccttccctcttcccatttctgtgtttccctttcttcttccctgttattattttccttcttgcttttctctctcatgagagtatattcttaattctgtttccttctggtgccaacttctttttctatttttattcttgcgtttgagaggtttctttttccttttgctttcaaatcaggagcctgtaggaactgatcttagagatacataccctactaccgatgcttctatctctttataggttgtgtgatgttttctttggaacctctgcgaatggttgtccttcttgtttgttgccacagatctgttgccaatctgctaccttagttgagcctgcagtgccgcactgcatgctgggatctgtctgtgtgagtaaactgaaatttctacagcaccagacagcattagagttggcttgagaattgccgtactttgcttccctttgtatgtatttcttgtatgctgccgagtcactgatggctagctctgtctggcaagtaattcaaaaatgctgtttatgtagaaaggaaaggtagggactttaccacactctgtcattaaagggagcaattgaagaacaaaggaactgagtaaatacctatatattgccttttgtgttgcgaaacactgtagcacaaacacatttgtgttcagccaaatgttttacttccttttgtaataacgcatatagtaggttgtctccacatatgtacaagaatccatattttatttaaacgtatatagtcaattgttcatatttataggctgcaaacatttctcaatctcaaagacttttacatatccactcccacacagctatttgttattattttaaaagttcttaaattaaaaaaaaaaataaaatatactaatatctctgttggttgattttattaagcaacttaggatttcaacacagtttaaatcatattgatgactcagatcctggcaggtcttacaattcctgtgaaatgagagcacagctaataaaaatattaagcaattacttttattaaaatcatagggtttttttcattatcacatagaaatgattgatctatacagattggtctcactcatgtgtcttttgggctgcttgggagcttcatgtagaagtggaaagtcccctttgctcttccttcgaccaaggtggggaaaatgaaggcatagaatacaatctagggctattaaagaattgctggcattacttctctctatcacgtgtgagcctggctgcctgcttcctgaggtaggggatccaggatgagactgtgccggagcctgtttccacaactgcatttggagatccgtcttattgattagcgggggaaaggggtggggatcaggagtgtgaggtgaggggaggaccaactgacgactggctcaatgaagcacaagacattttcttccggaaagatgtcaaacaactgagaaacagccagagaggaagtagaaaggtggaaaaatgaggagaccctggaagaaatgaaggcatttcctatgagacagccttggggcttttttcttttctttctttttttttgcttccatcatctgacctgcaaaggctagagtgacagcgtcatgcaaatgctgcagtccagcaggtctgggagagggtggatgctagactgtgagttaatgttaatgatgagcgcagtgaaaataccagccgctgccaccccctgctcacagaagcgctctgagtcagcatcagatgctttgcctcgcctctcgctgtgtatctgtatgcctgtgtgcgcgcgcgtgctcgctcgggcatccgtgtctagccgaggggagggggtggcgtgtgagtgcgtggagggtaaaagccagtcagtcagtgagaagcaaaggtacgttggagagcaactaaaatctgactgatttccatctttggagcatcagatgtattccctaaggaggatgggtctccgtgatgggggtggtataattatgttaatgtcatttttatggaggggtgagatttttcattctgataattggttgaatgctatggtcaaaaattgtaaagccatattcagttttagggaaaagcatggacttagatctaagggctgttttattttttcgctttttgtgagtgctgcttttttgtttttttggtttttgttttttaactatttattttaagccataagtgattcagtatgggaaatcaaatgataaacagaaagagatcttatataatgatgcattacatcatggagcagaatatttaaagtcttacaaggcagagtaaagatctggacagggggtggggggtggtggttggaaaggggtgtggtactagggtggaggaggggggccaattaccaaatattttgtgcagtatagctttccttgcagcttacttggaaatggatgattcacctgttctacaggaaaacattctaattctttccatttttttttttttcctcctcttttcccttttaagatcaaccacctcagaagagccagattccacttctgtggccaggacttttacattatggctggtccgattgttttaccctgcgttctatgctactaaaccttggatcattcctaaagtacaaattctgttctcgaaccacaaacaaggctaaaagatcggaggaaattcagtgaatatacaggattggggttgtgtatttttaaaagtattgagctttataatgtaattattcaagaaatagaatcatggtttttttatgatgttgccagcattttaaattacatgtttattaagtggcattgctcaaataactacagagtatgcgtggaaatatttgctgtctgaatagtttggagattcaaagagaaaaatcaagcttcagaggtattaaattatgacatgcagaaaagtttttgttttgttcttaactgcaacggtatatatttaaatccgatttaaagtattatatgtcctgggcccaccttaccagttgtgctgtatagcagtgtaatgggaagcaaaatttcaattagggtcccattaactggcatataatccttctttaatgtaatagaggctatggtgttgctgtacaaatctgctagaagcagattttaacccatgtttagtctctttctttggatctaatggaatgactcttaactgttcattgtctgcattgtttctcatattcttcattattttaaggtctggaattagtctataaatggtcgtcgtgattactcagctcatcctaacttttatatatcatatatatttctactgaagtattttaaatagtatttagaggtaaaagtctaagtgaacccaactgtaatttctaagctatccttatttctggaagaagaattctaccgcatcaaaccagacttttcctagtccctgagaccctaacttgtgaggtattttagtaacatcacaagtcaggctcttgggacctaggcggaggggaaccagcagctttggaccttattgattgtctgcagttaccaccagaacaaaagaacatacatagattctgcctaggagaaaagaacaatgcttttctttatcatcagcaacgttttcaccatgacccatccccaaaaatactattgtcagaaactgtactctaaagtgattacacagttgcactgaaatagcgtttgtattataacgatcatacaaaagcaatataagaaacctgtgtaagaagcaaaattaaaatataagtgttttaaaatgcttcttttggtgcattttaaggtggctagtataagaggatatctcttcagttaatgaagagaggggattatatttataacttttcatatgcattgaaatatatacattagctacttaaataaatcctgtatgcctccatataactatggctcagactatgtcatatacagctataagcatgcttgaggcctagaaataacatgatttacaatcttctttattgaccctattagattttactaccgatttaagaagaatgctgttttatactttgtatttattgccagggcttttctgagtcttctatccaaccaacatactttatatgtcttaacaattctaacaattattttgttacgagagtccaagagtgaaagtttcaccaataatctgggaaaatatgtctttttaaaattttttacagtttactgtgtacatatcatgggcctacgtgagataaaacagtaaacgccacctatgaagtcaaactgctttgactagcaactgcatatgaactgcatagttttagttttataagaattttagctttatcggaggtaactattccaaccataagtaatatgtcatatttgaaagtttaatagccattgccacatcagatatgtctttcttggagatagaatcagtatgctaaatctatttaaaaattttacaataatgttacaaatatcaagattcaaaatggagatgacagactttccttaatagaagcaacaaagtggcttcattcttttaactattgccttagatgggtgccataaattatgtgtcttctgcattgttaaaataaatttatgaatgtattttagaatactgtacggagtctttgttcatctttttaaaaatttcttataatacctacttgaaatattacagaatacaaatcatctattagtcatagttattaaaaattactataacaatatcataaacatacacatctatataaagcatgcagaatatgtttaagcatgtatgcacactgtacctattcagattctttatttatatcatctacttcatttatctagaagttctgaaattttaggtgtgtgtatgtatatgtataaatataagttttaaagctccaaatgaaaggaggtaatataaacagtaaagagctttggtagtatttatcttttatttcttttgacctcattctcattggaattgagtattttttaaaaccataagtttcttaatacaaagaaatctatgtatgtgtgtctacatgtacacagaagcttgattacatttaatagcaatgttcacacaatggatctgaaagtacttcttgtaaaaaagaatatcacatacaagtatgtgtttactaacatctgttttaacatgatcataaataatatctgtgaaaggttccatcaagttagttccaaaacaatgtaaggggtagatgtttattggctatagtgatatcagatataggttattcaaacgtgaaaattttttaatgttatcatattcatgaaccacactatatattaacttctgtctcataaaagaaatataccaaaactgaattgagaatgcagtcatgtttgttcattttcaccataaacatataaaatgttttttactgataatcctgcacaattggaacttctctatgtaaccctcctatatgaacagtctttcaagagcgtcattgacaaagcttttcttttacttcataaaggtgtatatagatttaagtgggtgactttgcttatgtaggctactttatgctgtatgtgcatagacagatgccactttttctgcatttctatctcagctgtcacaggataatattgttttagggctttatgatatgatttggaaaatcagatcatactaagcttaaaataaaaaggagagatctacaacaaagagcgagaaaatgatgtgtgttgcatgcaaaaaaaacagtgatattaacaattcgatggcttcctggttgggagaccagcctgagccagacgcatatattaagggctgtctgctgccgatgtgagcttgctcaatgcggtggaaatgaggaatcatctcctttctgacaccagcttatttgtacattttaattttgaaatagccaatcactgttttacataaatatactaacccctgcctgattcattttctttcccatattgtttgttaatttactgtgaacttcaagttcctttttttggcaaaaaaaatcatcattcaacttcaacatctaccaaagaccaatgaagtattagcttttcttttgtctcttttgtattgctctgataatattgtgatattcatgcttttaacttttaatctctgtaaggaaaacatcaattttccaaaatagcattttttaaagccttttaggatccatcaaggaagccactctggaattttgccaaatctaaatatgattatatttcatttcagggttcatgggatcaatatctttttcagtataaaagtcccaaacactttagtattccagtggagctacagaagaggtgtagagatattcttaaatcatttaagcattaggctacattaatagtgtcttgaagagaaataagtatctcaggagaattatagtacaagttaattactaatgaaattagaaagggtatgttctgccttaaactcctcttcaaatggacaggctggtacatgtgcctaggcttggtctaatacaccttaaatatataaacggttttacaagctgtcatgtttggatgagtttgagaaaagcagtatataaagggttagctaacgcccaaattttcttgccatttacacatgcaatgcagcctacatttctgtaggcagcaaatgcaggcatcattttgattgcttgaattcttttgtttaattttttactagacatttaacttagcactcaaatcccactgatcccttagagactgcatttggataaggaaaacaaagttcctaatatagagaagtttaaaaaaaaaaaaaatcctgggcccttgtaaacatttgagaaatagacttttagtgtagcgctgcaaatacatatttagagtgcagaaacttaggtacctttattatctatcatcatcctggttttcttatctttcagtgaccaactatagagtcggtcacatatttatttcctatatgtctttatttcttgaaaggtttagtaaaaacagtgtaaaaattgacatatcttcataaaatgattcacaccatttcttcaatgagctagcttcaattttcattaaatgttgcttttctccacgtctctacatgttaaatgtaactttatgaagtacattagcagccaataatattaacttgtatgtaatagtttacttgtaggaatttgaaagcaggtggaacttgaaggtaattgagattaagtgaatttaagattaaatagcttcattttatataaacagttaatttcatgcatattttatggacaacttaaaagtgaaaaattctgataaggtgaactaaatttttcattattgatataagtaacgtgactttaaatctgttaccttaataattaatttctaaacaaacaaaacaggtataaaaataatcatggactatattcattaggtcaagtaaataagaataaaaacttcctaggttttgtcttggccatataaggtctttgaggtgttttgggttcttttgtgttgattgatagatttaactttgcctctcttctgagaagtttctccctctttgtcaataggtgtctgatgatttgtgagcctcaagtgactactctgtggaatcatctgtccttgcctttgaattagctttccctaggccatgagtcaacattagtagtttatacatccaaattggtaggtctttatgaaattcttctatgtattcgttctagacatataagtgaagtataagaaattatagatttacattgtggttgtttttacagcttctggacatctttgagaaaatacttgggtggcattgaaacactagccaatggaagcatttgattttgtagaattttgaaatgtagtgccttactcatagtacacttcctagtcttgggggtgggaagaccagtctgtagctaacttattactgtcttatacatcatgctaaagcccagcctgggcatttgtaaacctcggggaggtttctactttagacaacagtttttgttgagggattacaccacagtcagttccctccatttctccctctcttcctggcccccctcccacccaacatggagccttttcaactcttcaaagaagtgggaaaaaaaagtagactctttattaatggcagaaaacaaactggctgctgtacttccgaggcagctctctaataataaagcagagtaggcactgcaacaaagaattcttgaatgtactaaatatatagggaagcctatttaaattcaccagaggggcttagaggacaagcagcagaaagtttagaattcaattcaagccatgccagaaaatgaaaatgtacttaaaaaaggatttctgaaacaattgttcaaagaaatgtcaacttttaaggttctttctagaagaatgaaatttgtactctaatttatgtggtgactttttcaattagagaggaaaagtgattaacagaatctcaaaggaattgtatcttatgtttaaagaaaacgtgttttctttccataggatgttctctagtgagggccacctagtgcactgactaaaaacaaccaaatatatttatgggacaaacagataatgtatttttttttttttttagcaattagacataacaaatgctcatcttactttgacagaaaaatattcaactttatattctttctagttcattttctcacattcagctctacgatttaaaatattttaattgtaactctgaaagagcaatttgctgataaataataggactatgtgtttctaaatttaagagataaaaaagtgatccctaccttatctcttagtgattgagtcaagaaattatcgttgcccattatttacctatctataagacatgtgtttctataaggaatacccacatctataagaatatatattttattaatcacaatgttcactttctttataaaaactgcttataaagatcccagcactttgggaggccgaggtgggcggatcacgaggtcaggagatggagaccatcctggctaacacggtgaaaccccatctctactaaaaatacaaaaaattagccaggcgtggtggcgggtgcctgttgtcccagctactcgggaggctgaggcaggagaatggcgtgaacccgggaggcggagcttgcagtgagccgagatcgcgccactgcactccagcctgggcggcagagcgagactccgtctcaaaaaaaaaaaaaaaaaaaaaaaaaaaactgcttataaattttattcaaggccagtatggtcttgactgatgaatgaaatttcatacaggctttccttaataccttcttttagaagtaacatagatattggaaaaaaaagatcgtttttctttgtcctcaaggattgcaagttttaaagagaatggaggcttggacttgctagtgaccatctttgttgccattgtggagagattctacctgagaatgaaacccacatggaattcatcagttccacagtataatttgtcagcttaaaataagatatttatttattaatgcatctattcttcccaccctcccccaagttctctctgctggctctgcctctccctctcacctgatatgttctccctctttctttctctttctctccagtgttgacttcattctcaggtaagctttctgaatgtggtggcaaagatggccacatacaacttcagacttgcatcatgcgtcatcctacagcctgtgaatccaggaaaaataaacaaacaaaaagattctctttatgccaacatcaatttcagttgtcagaaaatcttggattggctctgttttggtgacatgcccatatgtggatccacttatttgataaacaaggactactctgattggatggccaatgtagggaggcaaaagacgactagcctatcaaggtcatgaggaatgagtgagggtctgtcagtcgtagaaagtgaaaggaatttaaagcaggcgggaatgtaatggaacacacaaccaccactacacattttttaattactgagtataatgatgattgataggcttttgaaaatgtttgtcttggtaaactcactggtacctatcaatgtgtaggcaacattagtttattttgccaaatgtcctcttacagcatggaaactataaaacatctgctgcagcaaatctcaaccttgagtgtcatgagattaattacttttattaacactttccataagcatgtaatatatgacatataccaggaaagtcagcatttggtctcatttaggaatttgaaattttaaaaattatttaagattactagaaattgtttggtaaagaagagatgattatttttttctgtagcctattgtgtctatccttaaccaccatatgatcagaccatttccttacagcaaattttatatcctccccacttttacctctaatgttagagataattagtgctgattcttggaaatttttatttttgtttatgaattaatttcttcctctactactattatacatatatatatgcattatatatacatatgtgtgtgtgtgtttgtgtgtatgatgtatatatgatggctacagttataaaataaggatgttagattcttattccatatcctttaccttgttgctcttttgtttatcatagtatgacctgggtggtttttaacattttaccatcaagaactactatttaggaatctttctcaatgaaaaagagattaatttactatgaataatggttctaatgcaaaacattttgggcttttgttgtgatgcagatgagcaaagccataaatataatttagagagtttgaaaatgtattttaacattcacaattcttcttactaattaatcaaattacaaaattatgctgtggcttccagtatattaaaataagttgtcatatttggaacatctgtttatggtcctattatgaatatgtatttctaaagggctgaaatatagattgccataaataatgtttgcaatttagtccgtggaaaaatgatacctacttcccttcacaatgcttgtttatttcccacgaagtaaatcttccagattgtattttatcattttcttatcaagacggaggaaaaaagactcgggtcttacttaagccttgctgattggttaagaaaagagatggctgtcatcggcagccttgccagacactgtaccgtggctccagacagtcagctggtactatcgctttgtctcaactataaatcacagtctcgtaatggccaaggctgacaccttgacattttcaagaagagtaaaagacctgatttgaatggaaatcaatttcatttcacaaatcttgggtgactactccaagccttttcttgtgtcttcttgagacttatttgggattttcatgatcatcagaggattatttgagtgttatattatgactttttaaagctataaaaccatattcttacttccttcttcattcctaacatgagaaaattgatttttaaagttttatgtaagaaaaatcactaataagcactgatagtttttaaaatggcaatagcagccaatgctgtttagttttgcaaaacttttgtaaaatgttctctgatttaaaagtacaagctgtgtacacacgtatccagattaacctttgattacctgataataaatattagcaattatcaagtgattttgcacttcaatcaagcaggtctcaatgaaacttaaaatcttttgaaaagtattttcacttttacgttcttagacataacaagaaagttttaagccttaaattttaagtattctagagccaatgatgagtaaaaagtacttaattatgttagatgggaccttgcattaaattgcatccgatcttttgaccattcgacccaagtgacacagaaataatttcatactttactagtatgaaaagaaattctttttggggcttttaggagcttggcattgaatgtttaaaatgtttaatatacttattctgttacatctttctcctttagaagaatactaccatttctttaaaagcacggaggggaagacatttcttctttcctggtattttgtcttgatccctctccaagagtgatctaagctcagtaaagccttggtcttctcgacacaatattaatggaaaatgttaaccttacctatctctcttttttaagtatggagggattaccacaatgccttgtgatgatttctcttcatcttcattgttagtcctcaactttgtctcaaatcataattttaaacagataaactttgattgttaaattcattattttgtaaagccctatgaacgagtgaaattacacacagttacaaacaggattcccaacccttaaatctttttattcatccttctatccatctactcattcattcataatctatacagaacatgatcctactgaggtcatgagttcgagaccagcccgaccaacatggaaaaaccccatctctactaaaaatacaaaattagccaggcatggtggcacatgcctgtaatcccagctactcgggaggctgaggcaggagaatcgcttgaacccaggaggcagagggtgtggtgagccgagattgcgccattgcactccagcctgggcaacaagagcaaaactccatcaaaaaaaaaaaaaaagaaaaagaaaaagaaaaagaaaaaagaacacgatcctatgctacgtaggtgggaaatacaaaataaaattagaattctttctttacaaaatacgttcttatgagaatttgtttaaaaaacaaaaaagttatcaagtcagaaagtgatctatccacaaaggagatgtaaacacaacgttctgatgttttgggattctagaaaaggcattttttgttgttgtttttttttttggttgtttgtttttttgatggagtcgctctgtcacccaggctagagtgcagtggcacgatcttggctcccttcaacctctgcctcctgagttcaagcgagtctcctgcttcagcctccagagtagctgggactacaggctcccaccaccacacctggctaattttttgtatttttagtagagatggggtttcaccgtgttagccaggatggtctcgatctcctgacctcatgatccgcctgcctcggcctcccaaagtgctgggtttacaggcgtgagccaccgcgctgggcctgaaaagtcatttattttagtcattgaaaatcaaggacaattccttggtggaggctgcatttagctggtccctagataggaaggatttctagagaaagtgatggaagggcttgggtttctgggagactatacagtatatacaaatgtgcaggaacaggaaagctgggctatgtttggcaatgaatgttgttgcaaagttaggtgcattgttggaaagttagtaattgagtgcctaataaaaagtaagctgaaatcagttgatggagtagctacagagttcagggaggttgtcctggggattgtgcaattttacaatggagtaggcactgaggaccttttaaatatttggggacagacgcaaggatgtaaagtgcaagattaatctgtttccagtcaatatggcttaatactccaatccagaggacctgtcagaattactgagcaagctttatgtagacacaccatttttcctaccccttaaattctgactcactaggtctggggtagagaatgtgcaggtgtgttttgtaaaagctcctagatgactggctaacacacaaattgagaaagagttggatagagaatgctgaaatgagaaaatataagggattattagatagaaataaagactattgcaatgtgtaggaagaacaaaaatggagatataaaccagggtttcctaacatgaatttcacatgcccctagacttttggggttttatattcctatgagagtgcatgtaatattttgagtgtatgtctattttttttctggaaaaggtgatctaaccatgtatataatattttcaaagactaaaatcacccaaaattaagaactactagggccagttagtatgaagtaaatgggagaaagttcatgaatctacaattggaagtatttaatgacagagtagattgcatagggatgaaatttgtggcaagaaagaaaggcagagaagatttcataaagtttttctacctgttgatactaaaagaattagaatcatcatattccttttgtgaattagcattaacttcctcttacacttgtatttcagttaatagaactttgatattaggcatggtgtgaatgtggcaccacaggaagttgttgaagcagtagtgaaaaatttagagatgactacatagcttcagaaatcattcttctagaaacatagttgaacacttttgaagttagggatcaggttgcttccatcttgttgctctagtagaaatgcaaggagaaaaataaaggcactgcactcccttttaaggaaacaatttggatttttataaacagaatctactatgtccttagaacttaatcacaagttacacaaagttttggagcggaggggtgcatgaaaatgcagacttaattctaggtagttatttacccagctaaaaatcagaagaaaaaaagcagtagatattgaagaaaaactatcaacctgtcatagtgaacatcaacaattttgaagcatctgataataaatgaacccaaccataatatgaggacatttatctcaaccttctccttaaataatatattttgcttagaaagatgtacagatttctttataacatatcttatgacacattttaacacctgtcttatacaggtgattcatatcctgaaaagattagaacacttccatgttcaactggaaagataatattactggttgcaaatgcagttaaacctattccaatgttactaagcctactagtcttgaaccattttaaaacaatttaagatattttcacattatctaaagataactaggttttttacaaaataaagtctggggaaggacaaaagaaaaagtaacaaactcttagagatcgatgatagcaaatcttcattttataaaattataaaatgaaaaattccagactaaatagaaaaacaaaaacaactattagtctcatcagccagagaatatctcctattatcatacaatgtaaactcatgtgctctatctctctccaccatcacatacatgcactcaatatttttataatcttttgtaacttgtttttcaattgttatatactgaatactttgccacatattattttatcatatgcttattatgttattgttttatgatacactaatataatttatttaaccagtcagctcacaggtgtacattgaatttactttcaccttatttttaactaatataaacactactatgttgataaatacacatacatataattatatgtagtgattccctgggtatattcattggaacagatgataatggcctgaatgaaggtgatggcagtgggattagcaaggcaaagagggatcagagaaaatttagaaggtagaattaacagagtcaagtgattgactgtatagttgaatgatatctggaaaacttaaaccaaaataattacctcctaacattatgctgttgctctattgttctccgctcatttgatctataacatttctttctttcatgggaaggaagatgcaatcaagaatagaataaacagaagatttgaagtgactggtagattattttttaaacttatagcaagtgtaatgagctctaaacaaattggtctggtttggaagagatagactcacaagaaaaaaaaatggttttacttttaatttctaaagttcatggccagaaatattagcctaatcctagagacctggatcatagaacttatcatagttaactatcaaatagagaagactttaggatatgatctgaaggtagtcatccatcatatagaacaccatgatactttctagactggggtcagtgaagagactagtgtcctagagagagaagaaaaaattgaatataggcaaatattccttatttcactcctagttttacactagtggtcgttagtgtcctagagagaaaagagaaaattgaatataggcaaatattccctatttcactgctagttttacaacctctaggggagggagtgaaaatcagagatgtgtaattccacctttattatacactaaattctcatacattctagaatattctagtccattttaatattgtagatacaatagtaataactattgttctagattttcttttccttttcaagattccttgaaaactggaatctttttttcatggagcttatccaggggtagcataggacatagtcttttttgtttttcctaagtttcattcagactttactttttcttctgtctttatgcagataatcaagtacttgatccttagcagataggctcatttattcacttagtcaacaaatacattaaataccttccatatggaaagcaaattattttaagttgtaaaattaatttcagctacaatttattgtattacatttttttaatgttaattgaacatatcaaggcctttatgcgggttggagcatatgcttcacacagatcgcacttagtattttaagattataattagaaataaacaaagcaggccaggcgcagtaacttatgcctgtaatcctcgcactttgggaggctgaggcaggtggatcacctgaggtcaggagtttgagaccagcctggccaacatggcgaaactccatctctactaaaaatacaaaaattagccaggcgtggtggcgcatgactcccagctacttgggaggctgaggcaggagaattgcttgaacctgggaggcagaggttgcagtgagccaagatcgcaccactgcactccagcttgggtgacagcgagacttttaaaaacaaacacactacaacaacagaacacaaagcacaaacacacagagacacacctacccacaagcctgtaagaaatattgatgatggtgctaaagaaaatgtgtgaagaaacagttcagaaagactgtcgtggcacatcttttcaaaatcattgactaaacacaccaagagaaaaaaaagaatgatttatttgttagtgcttctagtatctttcccaagaattcaagtggaacagagaatccagtgaaatttggtgctttgcatcattactaaactcatatctgcaaggtaatcatgtgtgataaggctaaaatgtaaaagcatttaaatcaatagctctttcagatgttcttctgataaaattgcttcatttactttcctaactaatttatgtaagtgaaaagattaagagaaaaactaatattaggagtaacaggatccaaagaatgtattgaacttcattgttttagttggcatctttgcgagccttttaatgatctgatctcagaaacatctatcttagaaaggggtatactttctggcttcatttacttgaaaataaattaagttagggtcataagcagaggttaggttacttctacctggaaattaatcagaaatttgattttgccctttgtattgcttttctgcccccacatctcaacacaccttctgtcgtacaatcctaaagctccctttcttgcatcgtggcagtttaaaggaatttgaagttgtggatttccatatttacataattatatactgaatatataatataatagggtagggtaaagtgtttttaaaagatgtgacatcttaaagaaaatccacagatatcataagtgagtctaatttattggcaaatttcaggctatgttcttagtcatatttctgctagaagaaaactactttccattttgtgttttctcatttgcattactgcaaagttattcatgcatatgaaaaggatattattcatctctgtattcctttctctccttattccaaacccaatgattttatgagttatacataaagaaacacactgctatatctatatgtttatacatagatatctatgtgattcaaatttggtattacagctggatagcaaccccaagtgataacattatgtgctacatgtgtcttattacatcattaatgatataccaaaattgtcaaatatgttgaaatccaacaattgtaactgacaagctttagcatgatttgcctccattgggaatgaaaaagagatagaggaatgtatttctgaattcttcctcaaagtgcatatggctgtacgataagctcttgtttcttacctgctaatatttttagtgagatgctgttgtcacagtattcatggtaactggtttctgaagtttttatgtgcataaagccatatcatctcctaaattgaaattccagtgatattccagaaggaactatgaaggtgaactggcaagaagaaagatgaccaacctgacagggctttttcctttctctaatgtttgattcttcttatctcaatatcccaaggaaattatttcacttgaaagtttaggcagaatccgcagaaaaaaaaatttctcttttctactctccagttctactcctaccccttagaaaagcaaatggtattccttcaattcttgaaagtttttccttaaaatatcttggcatttgcaaggcagaggaaaatagggttgacagtgaatttcatggacacaaacctcattcatgacaatgatgaggtattcaagatttctcaccctttgtgtcctgctttatgtgtatttagggatggcatgaaggaggagaaagaggaagcttatacttttttctttaaaattaattcccatttagccgttaaagagtggaatcgtttttaagccgggaagacattgtatttgcattttccttttcaataattgtagcagatatgaaagtgaatagacaatggcagtcacatacagaataacctggtttcctagatggacccacttgtcggagatcaaacggctacagcacatttagggttacactctctttcccttcctccttattctcaactgcagtggagcttgttccaaagttgccatggtaacactatatctggctgctagctctgtcgtaagttattgaactgagactggcttttggtttagcagataattaggttctgtctcacaggttcattttcctgtgactgggacgtgaatatgacctacagctggcctcaatttcagtgtcacagacaaaactttaacccttccaagctcctctggcacactcctaagcaccgcttgtgtggtagaggaagtccagtgtatgtcacccataccttgaggaggattaccaagtcctcattttattttttatctttagcataacactaaagaaaatatagtgaaggttgtacacatagagcattttcaaaataaaaaatataacaatgtgatatatagttatgtattttatatatactacatgaaactttttgtagtcatattatttccttgagtctctaataatttttaagtcacactgaaatttcttctgttataattaggaatccacagaatttcaatttcaaaacctctgttctcagaaatattaggtgggtacttttattctcagctttgagaactgtctgccagttcattgacactcctctctctgctcttatataccctgaattatagctgacattaaaaggttccattggagtcacaggcagacccatatgacaggaaacaccgctaccactctactaaatgccaaaatgctcactcagggcttaaatcttgctggcttggaaaaccagctacttcttttgcatgttgtatttggaagatttcaatcagttaaatagctgccctttgtttaagacaaagaaagaaacataactttgggaacagatattgaattcacaatatccatggcaacacagagagctgtggaattgctaagagaagatgtacctttgtatgtcaaacaatgggaaagaccttcaaggaaatctgtttaaaatttttagtgtatgtcacctagaagcttaacatgaaaaggtaagaaaggaatagggagagttgagtttaccagaattaaaacatgagttaaaggaattccataccctaattggccgaaggatcacctaaccatgttaatagtgacaggtaaaatttgtgaaagggaagattagaagattcaacaattgcatattggacttatgatgtgtgtgtgtatgtgtgtgtgtgcgtgtgcgcatgtgcacaggcatatgtcccgcatagactgtactctattttaatccgtgcctttcattctcaaactctagatgacaagagcacctcaaaggcagcagcctcaaggagcagccatggccccagacttgtcgcacggatgcagaaaacttaatggaggaggctgaggtcagaatgggaagagtttttaaaaaataaaaaggggagctaatatgtgaggaactgattgctgtgcattattttccactgaacagaccttcttttaacttctaatctcaagcacatagcagctgttgttttcatattaaagatcagtaagtgtttgttgaatgaatgtataaattcttccccaatctctgttccatgtaataagaactaagttagcattcaattataaagaggacttagaaagtctgcagacatttttgatcaaaaatccttttaactgtcttcttatggttcccggtaacacctaagcccaaaaaactcaggtcatttcttgcctgtactgttgcaatagcctcataataactagtcttctcctttatcaaccacagtcgtctccgctacacaaagaagagagggtgctaatctaaagtgtaaattattttaaatcagcacccttcttgtaatttcccagtggtttttcctgtcataagaataacatgcaaaattccttgcttgcaaagccaggtatgaccttgccccgtctaccttactggcatcgtctctcatgactcttcccctttttcactctccatcttgccttttcccaaccatgcctgctagtgagccttagcccttgtgttttctctgccagggatgcatgactggcttctttactttattctgatctctctgctcaaatgtcatctttttagagatagctttcctaaacatctttaaaagtaccccatgaactgtgaaacacctttcctgctttttcttcatagtacttatcacttcctgatattatgttagacaacaagcaaataagtatatgctgttcccactaaaatataagctccatttgaacaggagccttgattattcctgagtatacccctagtgcccagaacctagtagggctttaataaatattagattcatttgttgaatgaaaaaatgaatgaataattgaataaagatatccaggtagagtgtccgggcagcccaacctatgtgaagccagtacaagaatgtttctgtgacatagtgagcgcaattattcctctaaatgatgaacttgcatgagtacacaaggataaaattaagcacgtagtttagatttctgcaagtctcttcctcagattgaggaaaaacaaagaaattgagcttattctcacctcattcttacatgaactaaatccagaataaagcatcatttaaataccaagcacatccctacctcagccactcatggaatactttatctgtaaagggacagatagatagtaaatatttttggctttggggaccgtacagtctgtgtcgccactactcagcacttctgttgaggtgtggaatcagccctagacaacacataaacaaatgggtgtggctgtgttccaataaaatgttatttataaaactaggaaatcagcagatttagtccacaggctgtagtttgctgacccttgaattagagagtcttccccaaatcctcttcccaagttattgaaagaatgcccataggaccatagctccctcacctggttctttcaagaaatgagacaaattcagggatggttggagggtggaacgcctacctgtgacatgactattgagcctgatttctttccttttatctctttaaagtgagtcaggtcttaactttaaactgtctctaaagtggcaataactgggccatgtcaaatactcccaatgacaaaatttcttcttggagaatgaatgagggttgcatacagtggtgtgttggtaaatgtttagcaactggctctcttactgatttctgtagtgtaaattctcccatcctggccatctgaaactaccaatatgatgtcacttgatgtagagttgggaaaagacagtctcttgaataagtatgagctggttccagcccactgctgaacacatatttaaaagctacaatagctctgctcactgccattgcagagtctggaggaaagagtagcaggcttgataggagcaattggctgaataatcttttgcaatgccaataaataatgaaaaagtatataaatataacgctgtatagaaagctctcaagttcagtgtttggttaaaatacatactcagtaaatggtagctattattgtcttagtttaagttattgcaagcattaaaattaaatgtttagctacagactcaatccagttttaatgtcattgtgttaataaggcctcttaacattgaagcaacaaagataaaggaatttttttgtagctattcacgattctgcccagctcaaggtaaagatagcaacaaaatactccaaccagaataaaagaagtctccacttgactgcagctcttcgcaacacttcacaagggtcaagctgtgttagtttccttcagtgttaaacagaatgcatcttaagagaatagttcaattattgattgaatagtaggttcaagttgactataatcccaactaatacactctaagaccagggatgggccgacagaagggtaaagttttccactcaagtctcgaggcaaacactcagatagaagtagtaatatggatgccttctattatttggtcacatacaatactgttccagcccagttgtgcaaaactggtgaaataaaaggcaaaaatattgacaacagtttgggtaactggattccaaaatgggcatccatctaagagaaattaatgaaaaaaaagcatatggaccttgaaatacattaatacacagtttaggtttaaacactcagtttttattagaaaagactaacttatcctgttttgaacactacaaaagtgctttctgaaccatttactctcaaacctcctccacccattcccctccatctataacgctttctgcacatctgtaaaaggtatgacttagtgtttggtctgtgaaataaggttaaaaaggaagcatttctttttacattctagctaatgttgatatttttctcatgcttctattagcacataattcagatacattagttttgaagttttgaatcttctctgcttcttgagggctctctgttctagatcaacatgatctgtggaacaccagccaagtcctgggcagaaccctccccgttgtccaaatattactgaatcagttgagttttctctgttgtcaatgaattattccacatgtttctttggctacattttttttggctttctgttcacagtaaatatagcctttgtttttaaaaacttctattatgaaaattccaaatatatgcaaattagagagaatagcataatgaacctctatgtgcttatcacacatataggttcaactaattaaattatatcaatttatggccaatctggtttcatttataacatcattcgctcattcctaactccctggattatttgattgacatgtttctaaagttccttttaatctgtaggttccccctctcatttaatcttttgcaacttattcattgatgaaactgggttatttgtcctttattgtttctctcattctgaaatatgctgtaatgtcattaaccatattcttctttcctgtattttctgtaagctttgagctaggcagaaatattttaatcagattcctttttttttcttttagcaagatttcttcataaataatattgtatgtgttcatgaaaatagaaataaaaatagaaataaagaagaaataacagaaaaaggacagaaattgttaaaatttttttatgaaaacagatagtaaataacattgtaataaatcccaacagaacatagagaacctgactttattgacgttagtgggaggaggtttgtgattttaaaactatatattatggttatgtcatctaaaaatcaaatattcaagcacatatattaaaattagtcatcattacatttttccaaaataaaaaataaaactaaaccaacattaaccatcagtgattccatcaactgagcaagtttgagtagcattaccctagtgaatatcagactatcgattattctattcatgtacctgaaattggataacagtatgaagaatttcctgaacaaatacaagatacatatttagaccttctccagtctagaggaatacttgcttcttgtcagaatgaagaatgaggagtattgttttagaactggacttctttgatgacccttaagtaaaccaatatggaccagataacaggagcatttcaaagcatcagaattttgggggattcttgtggtggagcacaatgaggcattccagcctactctaagaaaatagttcatccctgtcaatatcctgggaagcagagttcagataaaactatgaagacacaatgtaaaatgtcagttgtctttgcaaaacattaagtatatgtgtattcttgggaatggggggaagtatgtaattatttgtggcttttcaaaaatgaatggcttttgaaaagccacctctgtagtgcctttttgattcctcttacgaaaaaaacaaacctggaaaaattagtagtctttaatttatagttagttagcacattatgacagaactttaatctcatatctcactaggtagaaatgaaataatacattttcccattatatattgattggagttaattaaatatagttagtattccatttacattgatgctttttgttcaaatctatggtattatgtataaatatgccaattattcagtaaaacatcactaaaattaaacctatattgttatgaagctgttagaaaatatcttctttgaattctgagagctgtattatattagtttaactagttatcttgaaattctgaagttccttgaatctattttaattttgtatcaggaattggagaggtttttccagaaaagtgttacttaaatgcatcaaatgcaatgtgggaattttgacccacttcttgtatttctattttcctgctgtttttgcccccagaggaagaatataaacattttgcttattgtaacacattgcttcattatgatatattattgttaccatttttttaaaaaaagaatgtttctaggttttaattaagctccttcacctaatatgtaattttaaagttattatttcatataatatctaacttgccacagttaggaacctggagcagactgaacctttggacaaaatgatgccgttattatgaaaacagaaaagcatagaccaggtgtggtggcatatgcctataatcctagcactttgggaggctgaggtggttggatcacttgaggtcaggaggtcaagaccagcctggccaacacagcaaaaccccgtctctattaaaactacaaaaattagcctgaaatggtggtggacacctgtagtcccagctactttggaggctgaggcaggagaatcgcttgaacccggaggcagaggttgcagtgagctgagattgtaccactgcactccaacctgggcgacagagtgagactctgtctcaaataaataaataaataaataaataaataaataaaatcatagctgtaggcaacttcaagcttataattttgcagagcaatagcagtaagatactctgtacaaagttaagtcaaggattattgcacatctcatatgatgggattctttttttaaaagttttattttattgtagtaagaatacttagcatgagatctacactcaacaggttttctaagtgtactgtttattatcactgatgataggcacaacattgtacagcagatttctagagtttattcatcttgcttaactaaaactttatgcccattgaatagtaactccccatttcccctttcccccgcttctgacaacacgattaccctttggttctacaaatttgactattttagatacatcatgtaagcggaagcagaaagtgtttgtctttctttgactagcttatttcacttagcatagtgtcgtccaggtcatcaatgtcatcccacactgcagaatcgccttttttttttttaatggctaaatagtatttcattgtgtatacgtttttttatccatttcacctattgatgggcattaagggtgtttccacatcttggctgttgtgcatactcctgcattgtgctattcatgggagtgctaatatctctttgggatcttgatttcaattcttttggatatacagccaaaagcgatattgctggatcatatggtaactttttttttcaatagttttaggggtacagtggtttttggctacatggatgaattatatggtggtgcagtctaggcttttagtgtatctgtcacctgattagtgtacatcgtacccaatatgtaatttttaaccctcactcctctagttttatttatatatataaatacaatttttttgaaatggagtttctctcttgtcacccaggctggagtgcaatgacgcaatctcagctcactgcaacctctgcctcccaggttcgagcgattctcctgcctcggcctcccgagtagctgggattacaggcacctgccaccacgcctggctaatttttttgtatttttagtagagatcgggtttcaccaatttggctggtctcgactcctggctggtctcgactcctgacctcaggtgatccacctacctcggcctctcaaagtgttggagttacaagcatgggccaccgcacccggcctatttataattttttgaggaaactttgtactttttcccatagctgtaccattttgcatttccacctacagtgttcaagagttccagtttctccacatccttaccaatacttgtctttttttttttttaatagccatcctggcagatgtaaggtgatatttcatcacagttttgatttgcatttccctgataactaatgacattggacttttttttatatatctgctggccacctgtatgtcttctttggagaaacatctattcaagtttctagttcatttttaaattggattatttgctttttgctattgagttgtttgagttccttatctattttgaagcttaaccctatatcaaatgggattcttatatttttgtttcatattttgtaatatatcaggtccatgaaattagctatcttaagtaagttgcttttgtgttgtttcttatgacaattctgattagaatattaatacaaacgtgaaatgcagcttttaccaacaaatgggctagtttttattgaatcaataaaacccatattttgagagttttactcaaaagaacctaaaattcagttgaatataaagaaatggggttgtttgtttttttcttgtaaatttgtttgagttcattgtagattctggatattagccctttgtcagatgagtaggttgcgaaaattttctcccattttgtaggttgcctgttcactctgatggtagtttcttttgctgtgcagaagctctttagtttaattagatcccatttgtcaattttggcttttgtttccattgcttttggtgttttagacatgaagtccttgcccatgcctatgtcctgaatggtaatgcctaggttttcttctagggtttttatggttttaggtctaacgtttaagtctttaatccattttgaattaatttttgtataaggtgggcgaaggacatgaacagacacttctcaaaagaagacatttatgcagccaaaaaatacatgaaaaaatgcttaccatcactggccatcagagaaatgcaaatcaaaaccacaatgagataccatcccacaccagttagaatggcaatcattaaaaagtcaggaaacaacaggtgctggagaggatgtggagaactaggaacacttttacactgttggtgggactgtaaactagttcaaccattgtggaagtcagtgtggcgattcctcagggatctagaactagaaataccatttgacccagccatcccattactgggtatatacccaaaggactataaatcatgctgctataaagacacatgcacatgtatgtttattgtggcactattcacaatagcaaagacttggaaccaacccacatgtccaacaatgatagactggattaagaaaatgtggcacatatacaccatggaatactatgcagccataacaaaggatgagttcatgtcctttgtagggacatggatgaaattggaaatcatcattctcagtaaactatcgcaaggacaaaaaaccaaacaccgcatgttctcactcgtaagtgggaattgaacaatgagaacacatggacacaggaaggggaacatcacactctggggactgttgtgggggggggagatgggggagggatagcattaggagatatacctaatgctaaatgacgagttaatgggtgcagcacaccagcatggcacaggtatacatatgtcactaacctgcacattctgcacatgtaccctaaaacttaaagtataataataataaaataaataattttaaaaaaaaggccaacttgtgaagctaaaaccagcaaaaaaaaaaaaaaagtgttattcaagagtaagaatgaaataaagatttgtttttggataaacaaaaaaaaaagaaagaaagaaatggcaattacttagagaggcttggaaggtatatttcagaaaccgatgtgacagcacttactgataattacagtgttaaaaaaaaagtttctgttttgaatgttcatgtaaatttgcattaaatttaattgttgtcaaatgtgtagtttatgttctagtgtgacaatttttaattttgtttatattcatttatgattcatttgaaagggtttttgtgtaaattgattgatttgtaacaaaatgccaattctcatggtacattattaaaattctgtgttagtgatagagctgctttttataaaaaggatactttccattaacatttgaaagtaagtattcctcactttatcctgataatgataatgacaaaaacttgtatgggaggatgtgaaccagcactacacaacttctaacgttttgtcttacagtgcttcaattttctatcttgtaaacttatatttgtccagctaattggattacattaagtgatctggtatttttaagcaaaacaaaataacagatctttgtaagagccaaatcaaagactttggcctattatacatgtaagctaggctttatttgttgtcattttaaagaaatagtaatggtgaccaaaaaacagcagaatctttttttttttgcggggggcggtggagtctaattttttgtatttttagtagagacgaggtttcaccatgttagccaggatggtctcgatcgcctgacctcatgatctgcccaccttggcctcccaaagtgctgggattacaggacttgaccaaaatagcagaattttttttttcttttttttaaagacagagtctcgctctttcgcccaggctggagtgcagtggcgtgatctcggctcactgcagcctccgcctctcgattcaagcaattatcccgcttcagcctcccaagtagctgggactacaggcatgcaccatcacgcccagctaatttttgtatttttgtatttttttttttttcttgaggcagagtctcgctctgtcacccaggctgcagtgcagtggcgcgatctcggctcactgcaagcttcgcctcccgggttcacgccattctcttgcctcagcgtcccgagtagctgggactacaggtgcgcaccaccacgcccggctaattttttgtatttttagtagagacgggatttcgccgtgttagccagaatgatctcgatctcctgacctcgtgatccgcccacctcggcctcccaaagtgttgagattacaggcgtgagccaccgcgccaggccaaaatagcagaatcttaagagttagaagacacggttaaaatcacccaccctctcttaggctgaaattcctaagcaacacatctctctggcttatagcattttaattaaggaattaacattttctaaggtaaggaagttactactttcgtaggcaactaatcacatttttgcataactctaatttttaggaagttctttcttatttgaaccaaattttatctctggactaataccaaatatgtctatatgacagcactttgaatattggaggtctgttttcatgcccttctccccagacaaacctttaatttgttacaataaatttttaaggatctctggaattacggcattattgttatacatctacatggacttatgataaagttttccagaccacgaagtctgcccaaaattttggagtttaacttaacgaaattagaatccagctacaaagttaaagagaagaccacctttacttctgacacccaaccacaagttccatattgccccaaaccaccttcagattccataatttactagaaatacagaactcactgaaacttattatactcacagttttatttattacaggggaatgattcataaaatcagtcaaagaaagagacacatagtacagagtctggaagggttccaaatgggagatttgtgctgtctttaggatgtattcctcttctactactgatgtgtgatggtacatttttggcccattttgtgttggtataacagaataccacacactagatagtttataatgaacagaaattgatttatcacagttctggaggctggggagtccaagaccaagcaaccagcatctgggccttctcaatgtgtcatcccgtggcagaaggtggaagggcaagagagggagagagagtaaaagagggacaagagggtcaatctacgccttttataacaaactcactcccatgataacagcattaatccattcactttgccctcatggactaatcgcctctcattaggccctaccactcagcactctggaattggatatttaacttttaaatgcatgctttttgggggacgtattcaaaacactgcaatacacatgaagaactatcaaacagggaagctcaactgagcttctgtactcaaagattttgttggagtttcaatacataggcatgagtgattgattaacaatatagcaagttgtccaaagagcccatgatgaataacaaagacattcttatcacctggtgaatttcaagggtttacagattacctccaaagaaccagatacaaagactgggcctctctttgagtgaggccaaatttctttctatgctgtatcatttgctattttcttggccccaaatactccaatttcttcaacttacatgagatacagtttatgaagttcaacatgtcttggatgtgtttctctagataatctctaacatttcaatttcctcttttgacatacatacttcctattgcttgtcttcagaagctatctctaatttaaagtattggaaccccactaggaagtgtaaaataatactttagggtcagccaacttggagaatcctgacatttaacagctgttaaaacttggaaacattagatgttccttctgaacttccagttcttcatagataacagtgttacgaataatacccacttcatattttatggaggctaaatgagatcacgtgtaaaatttttcatgcatcataggagcttgatagatattagttattttttgggacaaatactggacagtctgaatttgtgtgtgaaaagtatcttaagcactgcttgcttatcaagtcttctagactagatgtatgcatacattattaaaaacataattcaattcagttcattaaatatttatctaagttcaactgagaagtgcacagcattatgctagtgactgagagagaagaagacagtttctgcctttctggagtgatgacattttcataaatatctctgatgtaagtagattggagtaggtgttaaattcagatacaaaactagtacaacaatggaagtccaagacagaaaaaaatatctgattggggtcattggaagaatgcatctccaagaaggtactatgtccctgaaggcccagtagtgagtaactttgagaatttctgagtgaatttacttggtaaaaaagtagatttagcaacaagatataaataaattaatcatgaatatagaaataaactttaaacaaaattataacagaaataagagctctctaaaataattagcaatgttaaaaaaacaaacataacttttagccatgagtttaatctttgcatgaaaaatattttattgatttttactggaatgcaaagagatttcttctgtgcttcatgctttaaacatccaggaaactttacccaagtctgaaattgattacgtcagttttttatttcaaggaaaatatgtgtagattttatttgaggtagttttgttttgaaaactatgaaggaattaaacataaatcatttattcctcaaacaatttattcaacaaatattcattgcatgtatgctgtgtgccaggaactcttccagactctgggaaatatgtctccaagaaagcagacaatacccctgccctctgtggaagactgacaaatatacaagtgcatatgtatatatagactgtcagatgatgtaagtatgatgaagaaaatgaaagccatgtaatgggtgatggagcggggcatagaaaggtgccatttgctattttatagaagtagatcagggaagaccatgtcatggtagatatctgagcagagaccattccaggtgtgggagcatgtcagagaggtatccaggggcaacagttccaggcagagaaagcatgaagagcaaggtgcccaaggccagagcatgtgtgcttggcattttccaggagcagcaaggaatttagtgtggctgaaggagaatgagcaagggagaaagcagcaggagagtgcacatgaagccctgtgtgccattacgaagactctgctttttttttttttttgagtcggagtcttgctcttccgcccaggccggagtgcagtggcgcgatctcggctcactgcaagctccgcctcccgggttcacgccattctcctgcctcagcctcccgagtagctgggactacaggcgcctgccacctcgcctggctaattttttgcattttttttagtagagacggggtttcacagtgttagccaggatggtctcgatctcctgacctcgtgatccgcctgcctcggcctcccaaagtgctcaccctccctacctttagcgtctgcctcacctcttgtctctgtgttcctctatacctgtgctgtcttgtatggtcaccactagccacatgtgtctactgagaacttggaatggggctagcccaaatggacaatatgagaaaaatgtaaaatatctcaatacttttcgtattgtttcatacgttgaaatacaaatagtttgaatatatttgattaagaaaaatgaattccatatttcttttcttgtaattaacatttttgttttgagataattctagatttccatgcagttgtaagacataacacagagaaatcctgtgtaccctttatccagttttcccaatagcaatatcctgcaaatcttagtcacaatattgctactagaatattgacaatgatactaccttattcatattttcctaattttaattgtactcctttgtgtgtttgtgagtgtgtgtaggtgtttagttctgtgcaactttatcacatgtgtaggttgtatctaccaccacatcaaaatacagaactgttccttcatcacagattccttatagttcccttttatagccactctgccctccttcctgtgccctgtccctgcccagccctgacccctagcaactactggtcttttctccatttctaaatttttgtcctttaaagaattttgtgtaaatgaaatcatacagtatgtaaacttttgggattgccttttttttccttagcataattctctgaagattaatccaagtcattttaacagttcattcttctttttttgctgagtaatatcccctggtagggatgtaccacaaattttatttaactacttgcccattgaagtaccaagttggttcctgtttttgctataatcatttctgtacaggtttttgtataatcatgaattatatttgtctagtttaaaggctcaagagtccaattgctaaatcacatggtaacggcatgtttattttataagattgcctgattgttttccatggtgtctgtacccatctgttgcattttgctctttttcactgtggctattagacaatttaaaattacatacataatttttcacatttgtaataatttttcacatttcaaaagaacagcacccagacagttcttgttctcaagaacaggacttgagacagtcctgttctccagtaccaagctcttaccacctcaggctttcccaggtgcctcgatttctagctggagtgtgttctcattattcccggacagatgcacagacttctacagcacagtgagtggttaaaaaaagaatctaaaactaagcaacctgggtttggatgctgggtctgtcccttactggctctgtgatttgttaaggtatttaatgcctttgttcctcagttttcttatctgtgaacagggtgactgtagcagtactgatgtcattaggttggtttgagggttgagtgagttagtacatgtaaaattgggtcccattgaaacccttctaaccctttacccaagagtaggtttaaatcctcatatagacttccattgcagtcaatgtccttgttaaaattgtaattacatgattgtattagtctgttttcatgctgctgataaagacatacccaatactgggcaatttacagaagaaagaggtttaatggatttacagttccacatggctggggaggcctcacaatcatggtggagggcaaaaaggagcaagtcacgtcttacatggatggcaacaggcaaagagagagcttgtccagggaaactcctgtttttaaaaccatcagatctcgtgagactcattcaccatcatgagaacaatgcaggaaagacctgcccccataattcaatcacctcccaccaggttcctcccacaacacgtgggaattgtgggagctgcaattcaagatgagatttgggtggggacatggccaaaccatatcaatgattgtttcatatttttctccactactggaatctaaatacctatgaggccagtgacctcatctatctgatttagtgctgtatcctcattgctagcacagaactagttaagagaaggcacttatcacttaagaatgaatgaatgaatgaatgaatttccttcaatgtaaacatttactcactatttacttaaagtactattttgtttaatttatcctttcttaatgtttaaaagatcatgtattattcatgtttctctgattcggaagactaggcctctaagttatctgaacagtttttacatgaagatcccatgtattctgaaataaaaattgttccagtgtaatgacaaaaatcaaatgaaaaaataattagacatatctgtatgatactatttgattgttagttttgtttaatgtgtgtggcttaaataatcattttattgttatactaggataggttgacagaatccatgttacttaactgcttcctttggctttatgggccttttgaagtcttagcccccaaagcatcagtaggtgatattgacattgaagtacttctttatctctctgcagataattttatctcattatttcaattatttatggcttcaattaggtaacctccatgacattcttaggaaattcagaaaaaaacatggcacaacttcgatgattttcatttagccactctctaagacccaaactgtgtaccaaccatcatgatcaacagcatatgcttttacacacacacacacacacacacacacgtgcacacacacacacacattttgttagttatctacctttacttcctcatactactgagggcagtttctgtagtagaaagaacactgacttatgcttattctgagctagggtgagttaggctcttgctctaccatttttattaactctgaagtcttgaaaagaccaattagcatgtttcagccttcatttgctacatactgggaatcatacctggaggaatcacattgatgacaaaacacaagagtccatgtatagaaccgtaataataaatagctccatatttggatagtactagcccacgtgctgaatctcagggacatacttacagatgtacgtttcctccaatttcccctatatgccctcaaaggcaggtatcattgggccaatgttatacattaaatatgctgagtatcagaagtgaaatttaacttcacacagttatgtgacaagactgtgctataaaaccatgactaaatccaaactgatccataggagggtaaaatgtccgttttcttcattaaaacttctcagctcaaatttatactaaagcatatccaggaattaaaaaaaaggttttgatgatatttgctttctagtttaataagttttaatactgaataggttaaattaatacaaaataacataaaatgctaatatttattgagtatttactttgtacccactacgatcttaagtaatttactgggattattttattttagtttaacaatgcaggtagctactataatcgtccctattttacacttgaggaaacaggctaagagagattaaattagtggcccaaggtcagaaagctcgtaattcttgaagccagggtatgattctgtgtaacgtgagggttcaagcctttaccagtgatgcatgttgcctcttatttcattaatttaaattggtcatttgggttaatcacatagaaggtgacgttccattttgtttttgtatgacttgcattcttcaacatttttcatccacagtgcgataaaataatatcatgttcattctcttctatacctttacatttgtgtttccctatggcctttataaataaaacaaacaatttcaatagcaaatccttgcgtgaagtgagttagtgcatctggctcctcccattttcctgttgcaacccaaggactttgagggtcatcatcatatctacctataggccagcaataattttcatgattgggtaactctagtactatggatatgaaaatgtaatactacatttcttaaaaaattacttctattttagtagatctctatataactaccttctggaataacaatattatgtggattattttttctaattaaaatattaaatctttatttaaagactgctgttcatttggctatttatttacacattacatatgagtctctgtttggaatttgttagtttctatacatctgctccatgagctatttgtgtgtgaaagttgctgctttataagaacatttgcctttacgtgttgctattttattattgctatatttaattggaatgcctctattgtgtaaccagaaagagttttccaaacttgggaatgtttgcatcacatagtatagagatgtttatttatttatttaatttcatttccctaagatatcaactttgattaataattatatacaggctttgttcttcttatctgggtgtcaacagtaattggaatccatatccatatcctaccttgcaatcatgctgcaaaaggccaataaattcccgctgagtgtgttacttgttaaatttagtgcattacattcagggtaatgaataaaagcagtggaccgttaccgtctggctggctgaggaaggttagaacagccagactcccctgaggccttgagccagcttaaaaacggtgacaggcagaatcaagggagtccccaagcatcacagttcagtttgtctcccttaatttcctcttctgtagagactcaggctgtagggaggtgaggtaatcttatccattaattcaccacactttcataaaatgctgcgtgctctggtttcattaacaagcaaatacagtttagataaatagttatgtatttacatttgagtagggaagtgagaatgctactgaatgtaaacaagtggctacagcttcatgcagttcactttgcatatccacatatgtctattgtgtattcatttgtctgtattaaaaatgcacatagatatttttgtgagtgaataatcaataaagcaagccccataggtatatatgtctacctacctccatctcatatttattaaacacatgtaagcagtcactgaaaaaaggactacaacattgctaaggctacttacaactgtttcttaataaataaatacatgcttcatataaaaatattatttttaaaactgtaatgtaaaaatttcagatgtatggtaaatatgcaaatgcaacaatattagaaaaaactggtctatattctcagtttactgtttacagttgtgagaactgagtgagagtccttattctcccagtgtaataattattacacattatgcttcctgccaaaactagctgactgccttagtcctttgagttgtgaatatcagtatcaattcaaaaacaactatttaataacaactttcttaaagaaaggaagaaaatataattttatgaaatgaccacttttattattcttgagtgtctcagaaaatttagtgtaaagtgtcctttgctatccaggatataacagctggttccagataacatggtatgtctcattagagagatactagatctaattatgcaacatataagcaagatcattatagaaacattatctcgatgaggtaagtaaagtacatgtgaaatctaactctgctgtttgaaagaatttttgaaagcaaatgtaaggaattaataattacttaagtgtatgaagaaagctgttgcaaactacttatgaatctttgacatgtaatgaaaaaatataatagaatgataagtaccctgattatttgtgctagagataaaaatgaacttctgggcaaatatcttttgctaccgacaaattttttttctaaacagtaaaaatgagtgccttttcatagcatttctactgtgtcagaaattctcaaactttagagtgtaactgaaacacagagagggcttattaaaacaaagattgccggtctccaatctcagattctgttcaataaggctaggtagagccagaaaatttgcatttctaaaattcccaactggtgttcatgttgctggcccaggtccactatttgagaaccactgcactatgtgaaaatcactaaagaagacgcttaacttacattatcttcttgattatttttctttaagatgcaagtccatggattctattctgttaggtattttgctttctttcctttttattttttagagacaaggactcactgtgttgcccaggctggtattgaactcctgggctcaagtggtcttctcacttcagcctcccaaagtgctaggattacaggtatgagccaccatgcccagcttgcttgatatttttcaattaagctatctatctatctttgaaaatctagattcctttacaaataaatctatcttcaaaatatagttaagactatatgccggtcgggcgcgggggctcatacctgtaatcgcagcactatgggaatttgaggctggcagatcacgaagtcagaagtttgagaccagcctgaccaacatggtgaaaccccgtttctactaaaaatacaaaaattatccaggtgtggtggtgggcacctgtaatcccagctactcaggaggctgaggcaggagaatcgcttgaacccgggaggcagaagttgcagtgagctgagatcgtgccactgcactccagcctgggtgacagggcgagaccccatctcgaaaaaacaaacaaacaaaaagaggctatatgccaagcattaggcatatttataatagcatattgataaacaacagcacaaataataaaatgaatagatattaccagcttaatatttgacttagcaaggaagaggccaggaataattagaagtttcagctctacaaagccaattttgcttactcttgtctgtagacattgtctttttcctaagaagactgagtttgttaactaagtttattaattctgttcatatcaattttaaatttatcaaaaagtagctactgggtcaaagtcttgatattgaaaaactggattatgatctgttttccaagttgattttaactaagcgatttgactaactcttgtctccatcttcacagcaaaacagagcgtgacactcccaatcatctgcatgctggaaatgaggaaatggttattgaatgatacaagtgcttttcgatcatttagaaagttctgtttcccaagatctttttttttttttttttttttgagacggtgtcttgctctgtcacccaggctggagtgcagtggcgcgatctcggctcaccacaacctccacctcctgggttcaagcgattctcctgcctcagcctcccgcgtggctgagactacaggcatgtgccaccatgcccggctaatttttgtatttttagtagagacagggtttcactatgttggccaggctggtctcaaactcctgacctcgtgatccgcccgccttggactcccaaagtgctgggattacagttgtgagccactgtgcccggcctagcaagatcactttttaagtatccagaaagctctttcttatgttgaattatgtccagaggcataactagactgaaggtttagactccattcattctcctatgtttttgttcttaactgcattctgcagtcaaatcaggagctttagaaaatactgatgcctggctctcaaccagagagaactgaactgaattggtctggtgagtagacacaggtcattaggatctttaaaaaatcttctcatgtgattacaatgtgtagctgagagtttgagaccaatgtttaccgttatttacaggtgaattcattaaaagagctaacaacaatgaagttaatgtacgcatctcacctctcaagagtattaacaggccaggcgtgttggctcatacctgtaatcccagcactttgggaggccaaggcgggcggatcacccaaggtaagttcaagaccagcctgaccaacatggtgaaaccccgtctctattaaaaatacaaaattagccaggcatggtggtgcatccctgtaatcccagctactcggcacctgaggcacaagaattgcttgaacccgggaggcagaggttgcggtgagctgagatcctgccattgtactccagcgtgggcaacaagaatgaaactctgtctcaaaaaaataaataaataaaaataagtattaacacatgggaaatcataaagttttcattctgagcagtgtgtctttgaatgttttgaccacgcagagatgggattatcatggtaaaatccactctatggatttaccataatcttggtggtaacgtgttaacagaagcaatatttattatgagagttaaagtttcatttggtttaggttcatattttctttctcctgtcagtctgcaatggctccctaacataattccagagagcatatgatgtgctaggctctgtgtaggggacaggagcacagtggtaaaccaacgtaaaggtaagtttctagaataattagtaatatgtttagaataaatacaaatatgaaaatcattggaaaattaaaagagttaaatgtttaaaaaagatttacaaatcaacaataatttgatgttaaaatatagattatattgacaaaaagtagaaagggaatgtggatgtgaagagagggaataaaaggagtacaaaaggaaagatgtattcatatttttgtcctaattgggcagggaaaactgtgctgcttcattcttggctttgatactaacacaggtataaagtataagaaatatatgtagacattttaaggagacgtacaaaataaatataaaatataaacattgtgtataattatcaaatcactagtcaagaatcatataatttaaataactaaaatcaaggcaataaaagtcaaagttaataactgttatttattaacagttatttaaggacttgtaccctataaacagaaactatacatttttcaagcatctatgatttaccaaaatagactagtattagttaagaacaagataataataataaataacagaaatttcaggaattacataaggtcacaacttaataatacaaaaaaaataatcttttcataaaaacattccccaaaaatattaaaaacaaacaacaaatcaataacaacattaaaataagcaaaccatttgcctaaataactgttgtgacaaaaggcaaactaaaccataactgtaggccatttaagaacctactaaattacagcaccacgtttcaacactgatgtattaccaaagctcttcttagagacaaattcataggctttaacagtctattaaaaagaagtataaaagaatcatgtctttatcacaggaacttaactggactacaataaagcaaagatgaaacttagaaagaacacaaatttaattgcattagagaaattggaaaatcaacaagtaaatcacagaactaatatttttaaagaaaaaaattcgttactattttaaaaggaataagcagcaggaaaaaaatgagaaagaatacaacacgcagaaaatttttaaaaaatactgagggtaatgtttaagaaggtaattgcaaatttctagaagaaatgctagcaaatgtaatttgtataggatgttaaaacaatacttaataatgcagtactacattatcttagcaatacatagatgatttcaataatcaatttataatatttgactatatatagcagcattctatctctccatgtattcaagttttcttataggactcataaatatgttttaatagacttctggcaagtttatacttttgtgaaaattagaaagatttttttccattacattttttacctggttattgctggattggaagagtcacaaaattccacgcacacaacttggatgtaaacaaaaaatacagcacacataatctggtctttttctgaattccacgtccaaaatttggcagaaaaaaaaaagtgttcaatctcctgtgaatctactctgatctgctatactaaaaaatacttagtctttttgtgctgcatttttccccccttccccattatctcctcctaagccttgcctgggaattgcaagcccaccagagatcctattctgtcactaagcaaaatctgatttacaattttggctgaggagagggaacatattaaaacatatcaacaattttagaatcaatattattaaatttcatgtaggttttagaaatgttttacttgtatactttagacttcattttataaaattacatttttaaaactttttacatttttaggaaatacatgttagctaaaaaactgtgttttgctccctgctacgtttgcttatcctatccttcattactccttggattttagtctaactggtcttgggacatgcctcttccccacaaacacccccaccaccataccacattgctgtgacacatttagcttgttaatgtggtaagagtggagctcacttacagaatttttgcagactagaccttaggctacaggtctttaccatggagcagaaaagtggtatctcaaacctcatccacaaaggttgatctagtccaagcccctctccaggttcatgtccatgtacagctttgttcttattgtaacaacctacattttagaataggcaacgaagaccattaccaagagcagtaggaggggcaaccttcggctgtttgtttttcaggatctcaacttgtgaacttactcttctcttcacagaatgggataactgcctggcactcaccaagctacacttgaagaggatcaatccatgtcatcatgtccccaatttcatagcaccaagtattttgtttattcacaaatgccctattatggacatctagcaaacaatgatacatcagaaaaggagatgtgcataaattttcatggaataaggtataaagcccaactctcaatacatactaatcataacaggagtctaagaaatattctgaaataaatgggaatgcagaatgtgtcaggcctctgagcccaagctaagccatcatatcccctgtgaccagcacgtacacatccagatggccggttcctgccttaactgatgacattccaccacaaaagaaattaaaatggcctgttcttgccttaactgatgacattatcttgtgaaattccttctcctggctcatcctggctcaaaagctccccaactgagcatcttgtgacccccactcttgcctgccagagaacaaccccactttttcctttacctacccaaatcctataaaacagccccacccctatctcccttcgctgactctctttttggactcagcccgcctgcacccaggtgattaaaatctttattgctcacacaaagcctgtttggtgatctcttcacagggatgcgcatgaaagaatgtgccacagaaaatgagacacatcaatgagggtaggtttgaaataccaatttaaagcagactttcaccgtttggccaggctataaacattaaaaatccataactaagatcttactatatattcaggcattttaagaactctgcatatataattacatttgacccttctaatgcctttatcagataggttctattattgctcttttttaaataaagaagataaactttgaagagattaataaattaataaattggtcctccatgacacagattaataaatagcagaatcttgattcaaattctattttgtcctcgattttaacttcataatcataatgttataatgttgtttcatgttacttttagggattgcaaaaggttaaaacccaatttatattagtttaagaaaaagcagaaatcatagagggtaccgttagggtacttccccctttctatgaggcgtttcatagaaaccaagtacaggaatacagctgtgcctcaggaatatcagaatccagggaataaagactgaccaaacttagtttccacctctgccccagccacctgacccccttccaccacactccactagctccctccacctccgctctaccccccactgtcttacttccatccacttagtagaaaacatagttactgtgagctttatatcttttagtccaaatattcaatgcccaaaaacagttgcttgacctttttttttttttttaatcacaaacaacactaattgtggggatggaacactttggccaggtttaggtcattgtccattctaaaacaattatctattcagtctcttaaatcaagaatattttgagaatgtttttatatgtctgacactgtctttagtactgtgaatccagcagtgaaccagacaaacaagatcttatattctatagagagagacagggaataagtaagttaaaatatataataaatatccaagaggcaaatacatatataagataaatacataagctgatttcaaatagtactacattaaaacaaggtaatatatagcaaaagattgatggggcagaggagtggaggtcaatattagatatataagagaatatttatctgagataacatctgaatagagacccagatgacaagaaaaaaacagccatcaaaaaatctagaaaggtgatggcaggtagagaggatgaaaggtacaaacacaatgaactgagaatattagacagccaggatggctagaacctagtaagcaaatgggaaaaaatgtagggaataagttagaggcagggaggcagatagggactaaaattacatatgggaggctctgtaaggcatttgaatgttattcatgtggaaaaagttatagccaaagggaggatgctatgattttctcaagttgggttaggtaccccttgggttatgttttaatttgactgcttttgttgcagccagaaggttgtagaatgaggtggagtatttcccatgggagctgtggttctgggcagataaaacaatgcacaattctattctcttcacaattctgttcaagtacttctgttataaatccccttaacagtaagtgcccccattgtcaatcacagtggccactgctcttccaaaaccagctttatctaggttttattttctaccagttttcaatatcttaaattttcttctcttttatacaattttaaggctgtttaaaagggctagctcaattggaatatgcataactttccaatgttggaaagtgatctttgctatgctgatcattgattgattacctgacagtcaacacctatttgaatcactgtctcttgcctctaagcattggcttccaagtagatttcactgggctttgtattttaaagtttcctattttccaagctctgttatttgccatgcttcttttcagttttcttaggaaaaaaatgattggatcctgggggcatttgctagatatctggcaaggagcatcacacaggtataaaagcaagtcaacctaactgaggaaaattgagtaaaatggaaaaggatgccagtagaaaggagagaatctgggaggaaaaaaaaaagggaaactatatacagtcaggtagtagtcatatcaaaaaacaaaggaatgcccccaaagagttatgaattgctgcaggagaattaatgagatggaaaatttctcaaggaaaaagagccaagtatatataaaggggagaaaagcataaaatgaagaaaaaaaaaaaacaaataaggcaaaataaaaatttttaaaaaccccatagtgcagggtgaaagagtaaaacaaaagaaaggataaattaggaaatggtgcattgcattaaagcaaatgtattctgttttctttattcttatctttaactggctttgcatttctcgggtagcaaagccaaactgaaaggataattttgtttatgtacccaatttgcataattgtgcaatataaattacaatgctaattaaggacagcccttgggcttctggaattgggtcaaagtggctccccaagtgcagggaggttggggcattggctctgtcccctctcccactgcagggaagctgggcaagaacctctctgacagtgtgtgaaatcttgtcagaatttgttgaagacccagaactgtatgtctcactcccagacttggcttttaaaatcatttttgtgtgattccgcaatgaagctcttgaaagctaaaatttcttctaaatgcggtgttggttatcattttatgagtcccctcccatttttttttttttttttaattcagagaattttggttgaaacactagataactgagcatgaagctggcatgcaatattttctcactggactcttgccagaattgtctcaaaccagtgtatgatatactctgctcaggcttttgtgagccgggggagatgacaagctgatttctgagctttagttaaatccatgtccttgaaactaactaaacaattgcaccataactacatcaaattcagtcccagagcatttattccctgcactgttcataatagatgattgaaaggagtagggttcttaccatctttagcatgggttttttcaaggaaagaattatttctgagttactgttgtgaaggctggcataactactttggaggaacctctgtttaggcctgttttggaggtggtgtttggcaagcctttggtagccattgaaacttgacctcaagcaagttgtatgcaaaatagaaacaagcagctctcaaacactcaagtacttgagccgacgggtagggagggagacctattatcctgtctatgtcgtctctattcacgttcctttttctccttcaccttttgagagagtgtaagccccttttataagagattgattacctcacttgggtaacagcttaacagtcaaggctgctagttgtgtacacatgattttgactttgaaataccaagaagctctttccactgggataattataggagtgattggaaaatacgtggcctgtgttactttgtttgctagagcaatgttttccaaactctttcatatccagacatgaaaaaacaaaaagataactgtgtgatcctggggtgctatagtctgaatatttttgtatccccttggtggtaaagataacccccaaggtaatgggatgagaaggtggggcctttggaaggcagtttaatcatattagtggagctctcatcaatgcagtaagtgcccttataaaggaggcctaaaagagactccttgctccttctgccatgtgatatttcagtgagaagacagctatttataaagaagtgggccttcaggaaacttggaatctatagtcccttgatcttggactttccaacctccagaactaggaaaaaaatactgtgttgtttttaagctactcagtctatggtatagcaatctgaacagactaaaacctagggtaaactagaggagaattgggactgtgggcagggctgctcatgttccaaggtgactggatctgtggctttgcccaactcaaccttccaatttcctgaaactaagggtttaatatcttgtggcacatcagtatatctcgagcaaggttccacactgtaatccatgcagcaacaatgttcaagtgatcattcataaggagtccacggtcaaatcagcatggggtaagttgggttaaacacacagacttaaacatgtttatcacaagaattgtgacattagcaacccttatttctaccacttctcttttccctatggaatccacctctctgcactttcacttttctccacatggtttgggtggaactggcctatccttggctataaaggagggcacttgacctgttctggtcagtgagagcagcttatcccccaggccatagggattggttcaggctgacagtagactagagcatggcaaatcagagtcagactcaggaacaatggaaaaatttggcaaattcttggtagtattttttgagcatgtagataaaactatgaatgaattttctaagttactcctcgtatccgagataacatacctctcattttgctgaagctagtctgaattgagtactattttcaactggagaagtcttgattgatatttacttttatttcctaagattcagctctaatagatcatgttcctgcttaaaagtctccaggactcaccattacataggggataaagtctaagtaattataacttaatatataggttttacctataattgcagtaaatatggggcgggttctctctcactggtttattgatgacagtgttagctaagagtaaacagggtggtcagagtctgtagtctagttaagtatccttttaatacattggttgaggggtcctcaacaaacagattgctttttgctcctagagttgatcatgcttttgggtatattttttttttcctttcttctgcaattgttcaggtgcatttagtaactccagcctttctctctggcgtatactttgttactaattataaaggcataatcttgacaatgtagacattttagagaatactccttctgatggttgtatatatattgagaacagttaccgtaaagcagtgattcttaaagtgtggtctccggaccagcatattgtcacctgggaaattgttagtgatgtagagtcttgggccaaacctcagacccattgaatcagaaaatctggggatgatggccagcaatttgtattttaataacaaggtgattctcttgcgtgataaagttttcaaacagttgacaagaaaggtcaaagcctggagaatatcttggtcgaggacttcctaaaaccttctatctcattaccccaatatactttcctcatgcctttttaattgctatttcactagagtttttacttctctcgggagctcatcctatttaaccgggtttttagttttacaatttcatgcccactctgcgtggatctattgtcaggttctcacttttcttgatagttttcttggaaaattaaaagatcaagccaactggatttttattatttcaactgccattatatcttcttcagggtgttttaaaattatcatatacttgctcccccctcccaacccctttaccatcttgttgatttcagactagtatttaaatcatatttcctagacaggcaacttatgccattgtgagatacaaaatagttcatataacatagcaaggggatatcattctagaattaaactcatgttacagaaatttcatcacgaaggtaaaacacatttgtataaattgaactttgactatatttgcatcacaagcagtagaccaagacagacactgtttaatcatttagagcatcagctataaagtcagacttcctgagttcagatataacccaccacttgctgattatgtgaccttgggcaaaccctctgtgcctcagtttctttttctgcctgaataaggaaaatgcttagtaaattttagttaatgctacagcttttgaggcaacatcctgagaaagatgcccacacgtaatagcaaggcaaggtttgtctaaactaaaatcctgtctctgtgaacacacataaaggctcatattttgaagacaaagagaattggttgagaatgattaaacctatactggtaaatgaaaataacaaacaattcttataaaacttgcagaatgtactcaaacttaacataactttaattaatatgctatcagatttagtttagttcacattaacccaagcccagagacttacaccaattttagttaagataatagtctctgttttttctaatctagtctctttttatttgactagaagttcttactttccttttctgagggcctaattctcttctaagtccactaactcagatgttatcatcatgtttataaatggatcagtcccaggtgttgttacttccatgcctgtgagcacatattatcgtttgtaaaaaaaaatgttctaaagtttttaaatagctaaaaattcatgttaaaattcttgctatacagcagcccagaagaggtatggcttttctccactatggctatgatgcctgccaggaattattagttgttccagtaatgtccctaatacctgtctgaataatctttgggtgactgggtatagaattttacactctatagcatactggctaaatttgcttcttcacagttatacccatcatatactgtctggtcttaaaaattcacttacatattacatgtatacctgcatttgcttatttaaaaactattaaatatcaggtactgttctaggcatcaaaaacacaaggtttacttaagtccctgccattatgatgcttacattaacagtgaaataaactgtaatcattctagaaggcagaaaccgaaagttttcttgtctgcctttttcttagtagagtgctggaaacataagtaggtgcttaataaagactcctggattattaaaatgcatactatacttaaaatgttaggaacttatggccgggcacagtggctcacacctgtaatcccagcaccttgggaggccaagacgggcggatcaccaggtcaggagatcgagaccatcctggctaacaaggaaaaacccggtctctactaaaaatacaaaaaattagccgggcttggtggcgggcccctgtagtcccagctactcgggaggctaggcaggaggatggcatgaacctgggaggcggagcttgcagtgagccgagatcgcaccactgcactccagcctgggcgacagagtgagactccatctcaaaaaaaaaaaaaagaaaaaaatatattaggaacttctgaggagcctagttgaagaaggaagctcagcaaatgcaggcttatggagtggaagattatttgagcagcaaatcactttagagaatacctagtagaactgcttactttttaggtgaaataacagaaaatacctgttgttttagtaagggagagaccacccttcatattgtcttatgcccaatttctgcctccaaagaaagaagaagtaaaaactaaaaggcagaaatgaaatccacaagcatacagccctgcgccacaccctgggcctggtagttaaagatccacccctgacctaatcggttatgttatctatagattgcagacattgtatagaaaagcactgtgaaaatccctgtcctgttctgttccattctaattaccagtgcatgcagcctccagtcacgtaccccctgcttactcaatcgatcatgaccttctcacgtggaccccttagagtggtaagcccttaagagggacaggaattgctgactcggggagctcagttgttggagaagtgagtcttgccgaagctcctggccaaataaagcccttccttctttaactcggtgtctgacgggttttgtctgcggcttgtcctgctatattagcaattaaaaattaactgtaccatacagtcagttgactataccatacagtgtaccaacagtatacccccctgccccctgctgacatagtgaagacttgtgggaagtatcagaaagagaactggaattaaggaggaaaatcaagatttgtgactttagccaaatgtcttgggttcacgaaacccacataaaatggctcattttgggggatattgtgagaattaaaggaatagaatatttgaaaacactttggtacatttttctaggcagaacagaattgagttttggggagggtgtcttgagttaaagatggtgatgaaaataatgagtcattgaaatagaaggaaacatcctaatttacagtcattaaggactgccatgaaattccaccccatgaaaatctgaaatgggtatatataccttcaggaatgtgtagcttgatcatcaagagattcaagtatactgccacaacacacttatagtttagaccatgatcgtgtggtagagacagttaaaaatatttaatctctcttattctcaaataatgagtataggaaacaaataagaatttaaatatttctgaagatcatcatgaaaatgtctagcatattttgtaaacaacaatttcttggattattagatactttgctgtttgcttttcagtaggcacaaacatattgtgagatgttctgtatttatgaagttacaataaactgtgaaaataacagaatgcattctgggtaagctaaagcagtagtccagatatttcattaaaattcagatccatactttgggttgtattcttattcaaaaatatttttaaaaatattattgtaagtatgtttcttatcgccaatttttaattttcatttgtaggttgtggaaaatgcactagaatcaacaaacatggggactaattcaactcggatatcatgtcttcagagaagtttctcctgccctcctctccctgtagaattaagtattcttccactgtgccaccctctaacttgtgctcatatcttcctctattgtagttatgtgttcacatccctgttgtttttgtaccggcttctcccaaagggagacatttagtcttattcttcttggtaactttagcacagacctggcagattgttgacactcaacaaatgtttattgactcaaatgcattcagttgaacattgacctttgatcaactctgggaaaagtctgcaaagctagttaggacattcagaaattcatttcatttcaatcctaactaaataaattattgaagtctcagaacttctcagtacttgatttagacacatagaaacttgggtaaataacacctatattgttatattcctcaagaaaaagtttatcttttcatgaaatgaatctactgaggatatttatagaaactgaatgtaagtgagcagaataaagtggtgtgtgtgtgtgtgtgtgtgtgtgtgtatgtaatttgaagagtaggtgggagaaggttgtgataggatagcagatcttgtttatgatagtcaccagctataacagacactgcctgatgcctttccaatatccacttcccttttcttttttttctttttggaacagagtctcactctgtcccccaggctggagtgcaacagcacgatctcggcttactgcatcctctgcctcctgggttcaagcaattctcatgcctcagcctccctagtagctgggattacaggctctcgccaccacgcccagctaatttttgtgtttttagtagagacggggtttcgccatgttggccaggctagtcttgaactcctgacctcaggtgatccacctgcctcagcctctctaagtgctgggattacaggcgtgagccaccgtgcctggctctcttttcttacttaatgtctgtgtcaattaaatagaaatgtatcaagttaaaaaccttgcctcggtagcttccagtgcaaataaaggtacccatgccaccccattctggccagcagtaaaattgatggaagcctctggttggggcttcaaggaaagctttatcaaaagataaactcactggctttgtcccttagttcagtggtccccaacctttttggcaccaagagaccagttttgtggaagacaattttttccatggaccaggagggttccgggggatggttttgggatgaaaatgtttcaccttagatatcatcgggcattcaattctcataaggagcctgcaacctagacctctcacatgtgcagttcacaatagggttcatgctcctatgagaatctaatgccactgctgatctgacaggaggcagagctcaggcagtaatgctcactagttccgttgctcgcctcctgctgtgcagcccagttcctaacaggacacagaccagtactggttcgcaacccagggtttgggggcccctgtcttagttcctttgccttccttccagatggatgcctggaggaacaatcatcccgcaattgtgaaaattgaagccatattttaaagttggtttcaattgtaatacagaagaaatctggaccttgatgacatttgagctagagtactaatcttgatcttcctattcatgagcttgttgcaagagacaagacttttactgatttaactcattgttgggatttcttggaactaaacacagtcataatacattttttccttcccaggaaaatggtagagcatgacttttcaaatctaataaaactcatgtgtagctaaaaccactctactgaaacaattccatctcagcccatggtacaagggattttcctgaatgaaaaatggtgtctgatcattttgttggtttctttgttggtttttcctgaaacttagggttaaagaatccaggaaagttgtcttagatagagttataatttccgtggacatcaactgataaatgcaattacagtttgtatgcctaggtttggcaaaaatcatataagcaacatccctcacataatattgttttaattaaattttatttctttcttggtatgaaacatactgcagaagcacaatcaatgaacattggatagtttccttaaatcttgctctttgtcctatttatataatttattgtgtcagtggttctcaagtggtatgctcctgcaactcatcatctgaaaatccttcccagatgtgctgaaaaattttcattaatttgtatattctattttatttttataactaagtacacatgcttgtgactggaagagaagacacccctcatttaatcccagaggaatatttggccttgattcatgccctgctcactccaccccattattaagatagagatcgctgaagaaatccctgctctataaatgtagctgatccaaaaacaaaatggaaattcattattttaaatatttctacaagatctttgtacaactctatttttttttcctattaagaattacatgattctagaataagttccaaccctaagtatcaacactggaacacaattttaaaacaggaggcgattatctctatagtgagatttaactacagaggtgatagctctggttagtgaatttcaggactagaaatcaggcctgctgtctcttagcttagaggaggtataataagaagaggattagaactactgtgtatattaacaagaagaactctattatgttcagctatcattatatatgatattatgtttctttttatgaactatagttcactgtctttaagcataatgtttgcccaaggtgggggtgttggtgtgtgtctgtgtgtatatgcatgtgtgcacatgtgtgtatgtatagttgattcattcattctgacctactgaatttactgaaggaataagaagaaataccttgaactgagggacctggcttagctcaacatctgtaccatctacctttgagtatccattcctttactatgaagcatggatgctaaaactaaaattgcatttgctaaactactttgtagctagattcctgggtgagattagatttggtcaattagatgttcttgtgtaacatttagaaggtgatagtaaggcaaaggtcatgtgactggctgattttatttatgttcaatgatctttattggggtacactttatatataataataaataatgcacacattttaagtgtacaatttgatgagttctgacaaatttatatgcatgtataaccagcatcaatatcaagatatataatgatcccctcattccagaatagtctcttgtgttctttccagccaatgccccacccctggattctggcaacaattgatctgctttttattaccatggattatatttgtctttcctagagatacaaataaatgaaataatgtagtgtgtcctctttaactttggcttatttctctcggcacactatttctgaaatttgtccatactgttgatatggcagacagaattttaagatggttcctaaaattcttgcctcctggtatgtataattttctctcggttttccgctgaacactaacctaggtgctattgtaaagggatttctcaagtgtaattaaagtccctaataagtttattttaagttagaaaaattttcccaggtgagcttgagctaagtgagtgacctaagcaggtgagttgttagaaaaaaattaagagatatttgaagcgtagacaaaattctgttggcttttaaaagaaaacttccatgtgatagagaaagccagatgatagggaacacaaggttacctctaaattgacaaccagcaaaaaagctgagacttcagtcttatcatcataaggaattgaattctgtcaacagccacgtgaccttagaggaggcccctgagccgcagatgagatcatggccctggccaataccttaaattcatcctggtgagatatgagcagagaactcagctatgccatgctcagatttctcacctgtagagcagtaaattaataagtgagcattatttgaagctgctaagtttgtggtgatttgttacacatcaagagaaaacatatgctgtatatattattagatttttcctttatattggtgggtgtatttgttatctattacttcctaacaaatcgacaataattaagtgtcttaagacaacacatatttattacctcatagtttctgtgggtcagaaatctgggcatggtttatgtgagttctttgatttaaagttgttggcaaatctgtaaacaaggaagcagtcaggaccgaggtctcatctgaaagtcaacttgggatgggtctgcttccagcctcacttaacataacagctggcaggattcagttgctcttgggtagttggattgatggcctcagataactaggtagctattagctagatttcaccctcagtttgttgccgtgtgggcctccctaaggtggcaatttacttcatcaaaaccagcaagggagagagttggctacaatctctagtaatgtagctacagaaatgacatccccttagcaatgagatattttattaattagaaagaaattactcaacaggaggggattacacaatgtagtgaataccaggaggctgagatcagaaggagctagtgtagaagctgcctaccacagtgagtagtattctattacatgaatataccagaatgtctgaatccacccaactgggcatagacgtttgtgttcattcaagatacagactattattattttaaaaataaaagttactatgaacatttaagtataagcttttgtgtgggcgtgtttcatttgttttgaatgaaattgcagggtcgcatagaaaatgcatatttaatcttataagaagctgcttaaaatgctttgcaatgtgattttaccattttacactcccaacaatgtatagcaatatatcatagatctagtggtttcatatctccacaaacacttgatattgtcactcagtttaattgtagctacttaaataggcttataatggtactcgttatgattttaatatgcatttccctaatgcctattagggactaattatgttaagcatcttttcatgtatttggaggccatttgtgtaccttcatttgtaaaatatctgtttaagtagcttgcccatttggattgctttacattttattatagagtcataagcatcctttatatattctgaatataactcttttatcagacatacatatatatcaaatatttttttctaagtttgtggtttgtgtttttactttttatactgtttattgaatagtagattttatattcattttatccattctgttatgatcgatattttttgaactatgaaaatattgctatgtaaaaataaaaaatatattttcatcccgagtttcataattttagctttcactcttatatctgtgattcattctgagttttcttgtatagtttaaagtcagagtgggtgtttgtttgcttattaatatatttatagatatttctaattctttctagcaccatttattaaaaagtctctttttttacccattgaattattttttttaaattgttatgtctaaaatcaaattaccaaatacacattgtctattttgaactatttattctgtttcattgatttttatgtgttcctttacaccaatatcattgtcttaattactgtagatttgttggaaatatgggagtcaaatttaaggatttcaattttgtccttttatcaagttgttttggctgttctaggtcctttgcatttccctataacatttggaattaggttgtcaatatttccccagaataaagcctgctgggattttgaacaggattgcatggaatctataaatcaatttagtgagaattaataacatattaagtactctaattgatgaacatagtatcatcttccatttatttagtctttgacttctcggaaatgttttatagttttcagtgtgtaggtcttgaagtttgtaaaattctaagtgttttatggttttgactgtaattgtaaatacctcccattgttcattgttagtacatagaaataaaataaattttgtattaatttgtctcatgcaatcttctatactcacttctttccaatagttttatgtggaattcttagaagcttccacttacatcatcatgtcatttggtaattaaaacaattttacatccttttcttatatctgtatgtcttttttttaattttgctttattgcacttcagtacaatgttgaataggagtgttaaacactgattcttcccttattcttaatgctgaggagaaaagtctttcacttttaagtgtgatgttaactgtaggtttttatagctgcctttcatcggattgagaatgttcctttttatcgctagttgactgagatgttttatcaaaaatggaattttgtcaaatgctttttctggaatggtctgatggttcttctcctttatcctgttaacgtggtgaattataatgatcgatattcaagttaaacagtgcattcctggaaaagccctatagggttatgatatattcccttttaaaagatttgcaggattaattcgctaatatttgttcaggattttgtgtctaaattcatgagaaatatttgtctatacttttcttgtaatatcattttaaatcagggaaatgctggcctcataaaatgaattaaagaatgttccactctcctataattttctggaacagtttgcataggactggtattatttttccttaaaagtgtgataaaattcaccagtgaagccatctgatctgaggatttctttgtggaatcatttaaaattataattccaatttttaaattggaattttaaattgattttaactcagattttctatttctatttctttttgagtcagctgggtattttttttccgtttaaggaatttgttcattgaatttaatttttctaatgtattggcttaaagttggttatagtgtgctcttcttgtccttttaatgttagcagaatttaaattgatatgtccccccttttttttcatttctgatattgttaacatttcttcccatgcggactcagtgtatttgtgtttgtgctgcttagggttcattgtgattctgtatatttaaatttttcttaaatttgaacaaattgttcattttatctgcagatattcgctctgccaccccttcttcctgggccttaaattatacagccattacattgctcagtgttatctcacagctcacagaaatgcatttcattttttttcactctttttctctctgggtttcattttaggtggtttttattgatagtcttcaaaaatttactaatattttcttttgcagtaaagtttactaagagtttttgtctgcagtgtctaatcctgtgtggtgaatttttcgtgcgagatattctagtttttatttctagataatctaggttattctgtttaaatttcttctatctattaacatcatgttttctttacttaattgaataacactctaacagctattttaatatccttgccttctaattccatcacctctaccatttattgttctgtttctatcgcctagtttgtctcctcattatgtgtctcattttcctatttcttaacatgtttaataatttttgactggatgctggatgtgtgaattttactgcagtgatggtcagtcatagtcatttttgtcctctgttgaaacctagtagtgtgtcgcctttgttctagaaggcagttaagtcacctgcatttcatcttgctttttttgaggtttgtttttacttttttttggttatggctgcagcagcccatattctaggtataatcaaactccactactaaagatggatttttttttttaacatcactattgaattttgagagtgatcaatgaggatgcttcactctggctggaataaacccaaggatccccagccctgtgtgagctctgggaactgctcacctcacaactctgagccaatttctgcttattctcatggggttttatcctatgcagatatatctcacagctaagtctcaaaggggcctcattaagatttctgatgttctttttctgtatgacttcttcctctttgaaactcagatttttattccaaatatggttgtattctgggattccaggtagacatatcttttggggccacaattcaacctactatgatacctaatgaaaagtgtcatttagtatggacctcttaaatttcacgttacaaactacagagaactgtgactgtgaaattcaacttttcagaagtgactataatatcctgaaataaagtatatctctgtcttcaaatgcttttactagattccttgcacacagatttatgtggtgtactataatcatcacaaaagaatgacacagtactctctttcagtatgtttactgtttttccaggaagataaatcaggaatatacaaaaaaatcaaacccagtttaagagagcaaattaatagacatccaaaggcagtaattgaggggttataaaataggtgagtgcataagtttagagaagaaagctatctgaggtctggattcaattgaaaaggtttcataagtaatagggagctagagaaggaggttggagaataaagaatggaatggaccacattccaggaagttgaaagaggagataaaccacagtgaactaagggttgaggtaggcaagtgactggtgatcaagaggaagaggtggaaaattgagtaattcgagagcaaaccatgaattaaatgtagaataagagcttgacttttattctacactaagtaaaaatccactgatttttgaaacatgggttatgagtgagcttatcttttctagcttattttttctactgtctctcttcttccttctattttgttccaggatagtctttccaaaactctactctgcacatcaaaaattccttccaatttttttttttatttcttcagctcgtccctcaaactcattattttctcccattttttccctctaaactgtttttctgaaaattatcctagagcttcttctgtcattttgatgtgcatatttacaaacaagtgggccttacacaaaagtacaatcacctgccagacacttttttgcacttaaacctacagcctatttagatgtcaattatagttgaatattcctttgattaatagctaaggtttctatattttatacagatttaatcctactgtaatgacatgcaaagcagatttaagtttatatttagcagggatctgttgaaaatgtgaatgaaattctgtctgagctggaaccacgttgtgcagagcccgtggttctttgctggtgaggcccttaacccctctggctacagagttatttttctttggcacccaaaggtggagcagggacagatgatgaagggggcagcagttcaaacatgctgttctatcatgtaaatattctctaagcactagcgctggactattactctcagcagtttattagttcataggaaaaatacaagtaaatgtggaaataaacattgcaggcaaagttgcttttaatagtgtatctagtcttaatattcccaatttagtcatttctggaaatcaacacaagtgaagattacaagctccgttgctatatctttacaatgattatttctaacacagtgaaaacagattgacggcatcatctacagagtaagctgtggttagttgtacgtttccatttccctttctgtgtcttttccactataaatcacctgactgcaaatagccaagtatcatagacacgctttgttttccaagccttgtacatgttgagtagaacacttttaaaatgtcccacattgtagagtatagcatagcataagcttcaggagaaatacgacagcatcagttggttgcagtaggaaaaccatcccagagccacgattaatagagaaaagacacagacaaaattaaaaattttgtggacttgctagacaaactttttctgaaatgtcttctcacctttcaaacaacacaaagaaaagtatgagtggcctctgattctggataaagaagaagaatattgtagctaatttacaccaaagtcatccacatctctccaacacccaatccttcctaaaaggtaactaaacctatccagtaacagtaaacttgctcctaggtggactcatcttccatttcactcccacaaatgtcaggaaggattctaaggttctgaggaagaaaacttataacaaaaggtaaggggtattagagttgctgagcctagagaaaggcagaaaaagcacaggtataagaatagccttaggatgtgaaggagcaaggcacttattcccatgaggatgaaaattgtgtctaaattaatcttgcctctggcatgaattttaaagactctggtacttttacaaatgcggctgctgctattataacttagctgatgcatgtatagaataaagggtttaggttagacagtttaaataatttgcagattttagactttacaacgggaggccaatttgtttctgcgaagggacagataggacatagttgatgctttgagggccatagtctgtcacaagtacagaaatctgacactggagctggaagacagcaatagatcatgggcgtagcaggtttctgcagaccacacattgccaactcctgctctaaattattaacattagttgctagaactgaaccaaaacatcgttttggagaagtggctgatgtggaggtttattgacaaaggggaaggctaaactccgactcccatagctcctgttagtaaacatctttctaagaaaaaagttcacttgcaatgcaaagggagcatcagtacatattccataggcctccttccaactaaactgctgcccgcatgctccaccccatagcagtgttgcaacttgcatggcacacaaagatacggaaggtgtttacttaacaaagggaataatttaagtgtcctttctgaatgttggggatattgcttctcacagccaaatcaaaatattttcacagtttcaataaaactgaattttagtagtgacattacatcagtggttctcaagtagggtttgattttgcccagcaagggacgtttgaaaacacctggagatataactccaaaattgtcatagctgggaaggggttgttactggcatccactgggaagaaagcaggagctaagatgtttagcgggaatgggtgctgctaagcatcctacaatgcacaaggcatccccccacaacaaggacttatccaatccaaaatgtcaatagtgttgaggttgagaagccctccagtagtactttaataaattcttccttttgcgaaaataattacaacataaaacataaattcatttttgggaggaatcttgagagccatcactgcacaacagttttcagagcaaaagctttccaaatagtttgcagaaggaactctcatgaaaatattttgcattttgcaaattaatacaggaagtaaaaggaagcctaatatttaaagatctgaatgcagtatctttgagagtatggcttaaaattcttgctttgaagaaaggtgctggaattcagagtgttttgtagtttaatttctctaaccctagtgttggatataaaatatagatatatttagtttttctattatgagcatggtataggctggaattatatcacgcctgagcaataacttaccaggttaatgctgagaactggaactatggaagagagaaggcttaaagtacatgataaaatagaagcaatgcttttgtagagttggaaagagattagtggagacttggaactgcctaagaaccgtatgtttttctgtagggaaagcggtagctaagatgtagttgaggctgggctgacagaatcaggtcaaagtgttctgctccattttgatgtgtcttaatatggagttactcagatgaagttaaatctgtgtaagtcctgagtttggataaaggaaaaacacttcagtgaacatatggagttcccttcagtaatttagtttagtcacatatattgatcaaggttaccccaaataatcagaagctattaaaacttatcgaagcctccaaattatttaatgacaacagagttaggaggcaggaaccaaccaataaattctacatttaaaaaaatcaaactggttatttgtggaaataaatatgaaattcctgctactggtttatttatttattttaatgtaaaaattaactttttactttaaacttagatatacagaaaagttttcaagatagtacagaattcctagtacgttagtatggcacacctgtcacaagttatgaatcaatattaatacagtattattaactaaggtctatactttatttaaattttctgtttccctaacattgctttttctgttccagaatctcatgcaagataccatattacatttgttcagtatgtcttcttaggtttctcttagctgtgacaggttcttagactttcttcgtttttactggtgagatattttacagtatgtccctccattgggatttgactggtgttttctcataaactaggctggggttgtatattttgagaagaagactacagagataaaatgccagttctagaaaatcatctccaggttacacactatcaacttgacagatcactcgatagaaacctcgcatcatctagcgaaggtagtgcacataattcagttttaaactgaactttatttatatattgaaattatatataataaataccacatattatgtaagatcgtttgggaaaatgttaagacagatatcttgctttaatttttaaaaaatcattctgttttcttgaaaagtgttcactaaaatatttaactgaaaccacaactgtttactgctgttaacacctaatcctagactaacttacagctagtcttatttataacactctttaatttacttctgtgaaataatattgaaggtcatattttttcctaaagtggaaaaaacactactactcctcctaataatatttttagtaaaagcatcttataatttttatagcattttcatgtatattatgtttccggagtctcataacaatcccattagataatcagtggatattatttctttagtcatagtaactgtgtttttgtactttgctatcaaatatgacaactatttacatattgtatgtgtctttattgcatgagtgcaaagatatattaatagataaggaaatttaccactcttccttccctgaaaaatttacatttgtacttattatgtgtctatatatatttgtaagaggaatctatccattcaataatttccattataaagaaaatattgggttttgccgggcgcggtggctcacgcctgtaatcccagcacttcgggaggccgaggcgggcagatcacgaggtcaagagatcgagaccattctggccaacatggtgaaaccctgtctctactaaaaatacaaaaattagatgggagtggtggcacatacctgtagtcccagctacttgggaagctgaggcaggagaatcccttgaaccccgaggcggaggttgcagtgagccaacatcgcgccactgcactccagcctagtgacagagtgagactccgtctcaaaaaaaaaaaaaaaaaaaaagaaagaaaataatgggttttcctatttgctagcagttagtaagattttgcattttactaaaattagttttcaagcctagtgtgccaataaaaataaacattttaataggcaaatgccaaaattatcctgacacctataaacgaagttatcagctgaaatagatgaaattattttagagattattctgaacatctgattgttagatttctaaaatatatttaaatattatactgtagttaagttactgtataggaatagaagaaataagctattatttttcttttcttggcatctgctccctctaatttggacatttcatctgttgtaattacttttcaaaagctaataaaactaatatttgcttaaaaaaggtttattaaaacaatttgtatatggaaaaagaccagacttttcttaggacaatttatattaataagccataattgtttaatgtttgtgttaataaaaataatcttcaggcaatattatgggctagatgggtaaagaaactctcccagtacagagcgtctaaatatgctgataaaaatatttttaaaaagcttttcataaagctacttgactgatgtaaattaatcttagtccagaaacaaagataaaatatgatatcatagggccaagaaattattaaagcctattctaacccaaagggcatctactgatctctggtggcttagagcctaggttttaaagggacactgaatacaaaggacaagagacagcttgtgggccttgtgtgggaggtcaagtttgcctgccaatatgggacacagaaagattagccaggcaataggggtacacacacacatacagacatacacacatggaagcttatatagtttatctgacttgggcgaggcttggcatagagtagaaaaaaataaagactcgcttgaaaattcatgatcataaacttacattcaagcacatatgggtaagttaaaaaaatcctttttgaaaatttagtttaacatagtcttggattgtgcctatagttacctgactgaagcaaaagtaaatatttcatggagaaattcactctaaacacagttcctaaataattcttatgtcacatgactccattatacaaagaaattacaaaacacataagaaacaagccactgattatgagtaatcattaaaaagtctggacacaacagatgcaggcgaggatgtggagaaataggaactcttttacactgttggtgggagtgtaaattagttcaatcattgtaaaagacagtgtggcaattcctcaaggatctagagccagaaatatcatttgacccagcaatcccattactgggtatatacccaaaggattataaatcattttacaataaaaacacatgcacacgtatgtttattgcaacactattcacaataccaaagacttggaaccaacccaaatgctcatcaatgataatctggataaataaaacgtgacacatagacaccatggaatactatgcagccataaaaaaggatgagtttatgtcctttgcagggacatggatgatgctggaagccatcatcctcagcaaactatcacaagggcagaaaaccaaacaccacatgttctcactcataagtgggagttgaacaatgagaacacatggacacagggagggcaacatcacatgccagggcctgtcggggatagagggaaaggggagggagagtattaggacaaatacctagtgcatgaggggcttaaaacctagatgacaggttgataggtgcagcaaaccaccatgacacatgtatacctatgtaacaaacctgcatgttcaacacatgtatcccagaacttaaagtaaaataataataataaaaaaaaaacaaaccaacaaaccattatgaacaagagttaccagaaacagtaaattgcatgctcagacccatgaatattatagtcattggtactggtagatgcagaatataaaatctatgtgtcttacatatttaaaggaatgaataagaatttaaaggataaacaagaaatacaaggccatcccatctgataaagcagttttaaaagtgttaccaacataactggaaggaattaaaatatgtttatggaggtaaaaatttaataagcaagttttgtatcaggtcagagacacttgaaaaccgatttagtatcatgaggacttccatttttataatatagtggaatgggtgccaggccagtcatgtcacctaaaacatcttgcaataacacatgaatttagactgtcaaatcagactcaaatgaatcagagatctaacccagaatcaagaattactaattattttatgaatacaactaaatttagggcacaggcaaagtgagaagagacctgggatcattattagagctcccggttcttgctttctatatcagacgcactctgaacccagactcatatgtgaggtctctaaatgtgtgcagaagaaaatatttcagattatgaaacatttccattttatattcgtacagttacatggcctttgtgacatcttccatttcccgtgccacataaatccatagattccaaatttgtttatgataaaccagtctatgcaaccaagaatatactattacaagctttccataaataacggctctcctgctaacaaatacaatttgctagttttcaggaaactagctagttttcaggaaattcaaactttggaatttgtaaccacaaactagttctcatatgggtttattgcccaaatttatagtccatgaatggcccgaaacaacccaagctgtggacttagttgaaatcctagactagtacaggaatattactaaaacaaagacaaaaatggtatgatagaccctacatttatccaggactcctctatctctcccaaagaattcacaattagcattccaacaaaaatagtcagaaaactattagaaatcaacaaatccacaggtaaacacatcaaccatgtgctagaaaaattatggttggaagaacagaaaacaggattccagccacaaaattgataaaattgaattaccgaatacatagtataaactatatgatttaatatatttgagatattaataagaggtttaccttgaataaagaacttgtaaatttacaaatgagctattagaactcttagacttggaaaatatagttgaagtgaaatatttaaaggatttaatagctgattaagtttggttgtaaggaattaaaaaaactgataacattttagagaagttatttggaagcaacccagagaaaagaggtggaaaataggaaagagaagatagatgacaaggaagctaaagacagcaggaagtgatcctaagacaaagtaaatatgtgagtaaatctaaacaaatactgactgtatgaaacgatgatattagtatcgtaaagagacaaaaaatagttgaaaataatagcagagaaatcaaaaggccatttcttggaattgtttgggagtaaaagacccattactttttatcatttgggaaagttaagcatgcatagatactttctaggataacaactaaaataatagaaataaaaactccaaactagtagaaaaatacgaataagaaaccataatcattttcctaaaaaggacaaaacacaagcaaaaaataaaaccaggacaaattgtttacaataagatagtagaaatacatttttaaaaatcaatatttgcaataaatatgaaaagattaactgcctcaaattagtgctgccatgcggagaaaaaagaatgcttatacactgttggtgggagtgtaaattagttcaatcattgtggaagacattgtggcaattctcaaagacctaaaaacacaaatatcactggacccagcaatcccattactgggtatatacccaaaggaatataaattgttttatcataaagacacatgtacatgtatgttcattgcagctccattcacaaaaacaaagacatggaatcaaccaaaatgcccatcaacagtagaaaggataaagaaaatgtggtacatatgcaccatggaatactatgtaaccataaaaaagaacaagatcatgtcctttgcaggaacatggatggaggtggaggacactattcttagcaaacaaatgcagaaacagaaacccaaacacagcatgctctcatttataagtgggagctaaatggtaagaacacatggacacatagactggggcctatcggagggtgggagcagggagaggatcaggaaaaataatgaatggacactaggcttaatacctgggtgctgaaataatctgtataacaaacccccatgacacaaagtttacctatgtagcaaacctgcacatgtatccctgaacttaaaataaaagttaaacacacacacacacacacacacacacacacacacacacacacacacaaattagtgttgcgagacaaaatccttaagttttttatggatctcttataaacagaacacataaacatttatgaaaatataacaaaactttcaggcagaaaaaatatgagttcattcattaaacaagtatttatttattctctggtatgtgccaggcacagtctggccttctggagacatcactgcataaaacagtcaaaatacctgacatcgcggaacattaatttacaacttgtggaaatggataaataactaactaaataaattacattgagtattagaggactgaaataaatgctatgacaaaagataaaacaaagccaaaaagaaagttttgatgctttctttggaaatgggagacatgtatacactgggatgtttatgctgaaaaaataaaaggctaaaaatttatgtgctagacacctaagtttttaaagtaacttagaaaaagaacaacagaataagccaaaataaaaatatagcaatagaaatcacttatttagggcatattatatgacaggcaaggttctaagaatttcccttatgacctataaactcaacaacatttattaatctattgcaattttaaactacagcagtaaaaaggaaaccatttataatagtagcagcaaaaaaggaatgcacgtagaaatacatcttacaaaatgtgttaaaatattgtgcaaaaattacaaaactatcgtgagatagcaaagatttaaataaatgaagatatttatcattttatgaattaaaccattcaatatcaataagattccaggtttccccaaactgaatgaactatggatttagtataatgttagtcagaatcctaacagaatattttgggtagaaattgtcaagctgactttacatttgtatgaaaatacaaaggaacagccagggccatcttgaagaaggcaatttagaagacttatcaaacatcaagccttgttaaaggcttagagctttaatgagccttgatgtttaattaaataagagtgtagtgttagtaaaaatataaattaaaaaaatagaacagaatagagaaattagagccacacatatatggtcatttgattattattacaaagttcccaaaacaatacagcataaaatatagtctttccaaataatgatgtaggataaattaaacaataatttaagtatggggaaaatataaatcttacttgtatgttataataaaatattagtttcagtcagagtgtaattctgaatgtgaaaaacaatgcaataaatcttccaggacaattttgttctgaatttgggattcctaatggttataaatcaagaatcataaactggacttagttaaaatgaaaaacttctacctatcagaagctactgagggcaaaaaaaaaaaagttagctgctgtataagcaagcatgtttgcaataattttatttgaccaaggacttctgcttaaaatagatgaaaaaattctacaagtgaatgaggaaaacataattcagttttaataaatgacttgaagtctttagcatttcacaagaaaaacatggaaaggacaaagaaaggtgctttaacatcttcactaataagagaatgtaaaacagtagatgctgacgagaccagatatcaagtgttagtgaggatgaaaaataactagaactttcacacaataatactgggagtctctattgtaataaccactttggaaaacactttggaaaaacttgactaatacgaaacatatatctactctataactcagtaattcagcaccccgagtatagccctaacttagttgagtgatatacctaccaccagatatgtacaagactgttaatagaggcttagcttataatcacctaaaactgaaaaatcatccaaaagtccatcaatagtgaaatggataaataactgttggtatattcatgtaatagaatactaagtagcaataaaaaactaactgaattcaataacatggatgaataaaaaaggccgggcgtggtgtctcacgcctgtaattccagcactttaggagtgcgaggggggtggatcacgaggtcaggagttcgagaccagactgaccaacatggtgaaacccccgtctctactaaaaatacaagaattagccaggtgtggtggctggtgcctgtaatctcagctactccgaggctgaagcaggagaccccgtgatcccgggaggcggagcttgcagtgagccaagatcgcgccattatactccagcctgggcgacagagcgagaccccatctcaaaaaaacaaaacaaaacaaaacaaaacaaaacaaaaaaaagatataatgttgagtgaaagtattcatacaaaagagtatataccatttaaatttatttatataaaattgaagtacatgcaaaatgaatttgtgctaataaatgtgagaatagtagttattgttagaggaggtattgatagggaagaggaaaagtggaagcactttgtaatgcttgacatatatatctcgatgttagtgtcaattgcaaagatatatacatatggaaatatttatcaaaatgtagcataatgacttatgtgcttttatacatgtttatcatactctaagaaaatatatttaacagggtgacagagataacaattgcaatgcatagccatgctttagaccctgactcaaatatcctttaaaatatatatttatgagacagtttaaaaattagatacttactggatacttgaagatattagggaactattaattttgatgtgtaacaatttaaatagagttcatatatctttatttattatatcttaagttctggggtacatgtacagaacgtgcaggtttgttacataggcatacatgtgccatggtgtatgcatacacgtgccatggtggtttgctgcacccatcaacccgtcatctaccttaggtgtttctcctaatgctatccctgccgcagccccccagcccctgacaggccctggagtgtgatgttgccctccctgtgtccatgtgttctcactgttcaactcccagttttgagtgagaacacatggtgtttggttttctgttcctgtgttagtttgctgagaatgatggtttccagcttcatccatgtccctgcaaaggacatgaactaatcgccaaaagagttgttatcttttagagatgcatacaaaaataaatacagatataataatgtgatgtctgaagttttccttaaaataatatggggggtgaggtgggtgcaggtgaagtattcttggccaggatttgataagtcctgaaactgagaaagaggaacattggagagctttatacggctctaatctgtatatccttgaaattctctgtaattaaaaaatatgtttaaaaaaaactgttgagaaaaccaaataccatatgctttcatttaaaagtgggaactaagcattgggtacacatggatataaagacggaaacaataggccctggggactactagaacgaggagagtgggagggggcaagggctgaaaagttacctattgggcatcatgctcactacctgagtgatttgatcattcgtactccaaacctcatcacgcgatatacccacataaccaacctacacatgtactccctgaatctacaataaaagttgaaattactaaaagagtaataaaactgctgggaactatcagcatacatgtttcttctattaactacttattattaaagaatcaaattgaaattctagaacaaaaaacaaacaacaactgattaaaagtgcagtgcatgtgtttcatagggcattaggtggagctaaaagagatttaatataaaagaatacatggctaagaagaaaacgtctgaactgacacaatgggcaaagtgtctataacacacacacaaaatgagcattattggcaagtagggcaccaagatgtaacatatgtgcaattggagttttagaaggagagattagagaacatggggtagaaacactatacctaatgttaatgctaagaattccccaatttacaaaataaataatacaagatttaataataactacaatcttcaaccaggatacatatagaggaagctatcaaatcataactgctgtaaaccccaaaccaagtaaaaatcccaaagtgggggaaaaagacacgttatattcaaaacgaatagaaacaaaaacaaaaacagactgacttctcaatggaaataattgaaatgagcagattggagaatgttaggcttaatgctgaaaaaatgtaccaaacattctatattcaataaaactttgcttcaaaagtaaagatgaaataaagacaatttgagataaaagttgaatttgtcacaaaaagaccttcactaaaggtcttatttggcacttggaaaagacccacaatggcagcttgaggtagacaaaagagcgaaaagcaatggaaagttaaactatctggataaactttaataaatatttacagcataaataatactgatgacttttggggtataacgtagatagcatattaaagtacaataagaacacataattagggaggaaaaaatagaagtaaaattctgaagtcttttcatttttctagaaatattttagatttatgtcagaccttataagaaaagtatttgttttgcaatctctatgtaaaacaaaaaagtaaacaaaaaagctcaagtagacctagaaaaatgaaatagcaagagaatgcaaaaaaattcaaaaggatgcaaaaaaggaaaataaattaaattttaaaataaatagtatatttgaaaaattaaaccaaattaattattattttactcttaaaggaaataaaggctccaattaaaaaattgtcaaggagggaaaacaccaagatgcatgtaacttacgagaaatataacttaaatattagcaagcaaaagagatgcaaaaaaaaaaaaagaatagaaaatatgatcattcagacagtaccaaaataaagctggtttaagtaatactagcgaagaagagtttcatgccagaagcataactgataatgagaacatttcataataatcaaaaacaaaatctaccaagaatatatagcagttctaactttgtaatgagtaaaattcaaaatatatgaagtaaaagtaaaacaaaaaggaggaaaaagaaccgaatatgtaatcataatgagggatttcaaaattcttctcaccccataaatatatacacctactaagcccccacaatcagttaaaaaaccatccttttctcgtgaactgataaataggcatttaacctcatatgctagtccatgaaactaatcaacaaatttgaaagaatggcagtcttacagaatatgtaagcaattagtggaaatcagccagaaataagagcaaaagataactagaatgttcccacatgtttagaaattgtccaatacatttctaaatggtccttgcatcaagaaagaaagcaaaattgaaattagaacatattttgaattgaagacaataaaaatatcaaaacatgtaggatgtattgaagactatcctcactgaaaagtgcattgtcttaaatttctacattggaaaaaaactaaagtttaaaaatctgtaatctaagcattcaattcacaaataaaattcaaatgaaataaaatatctaatgaaatccaaagagtacagaaagaaaggaataataagacaaaagcagaaaaatatcaattatttctggagtaattggggcttttaagaaactctcaataaggatatgttaaagttgatgtaggaaataagaagttagatatgaaataactaacaattcttcacatttaaaaatagttcacatatgataaaggttaagtaccttcatttctgctctaaaaaggaaaaaaaggtaaaaatagcaaaaaccaatgggaaaacaaacaaaaagaaaataaccaaaccacaaaccacaatatggaacatcaacaaagctagaagtttgttctttgataagacaaataaaattggcactctctttgcaagatagatcaagaatagaaagagaaaacacaaattcctaatattcaggaatggataaagtaaactcaatatagatcctagagacatttaaatgataataaaacatttgacatgcatttatgccaataaatttcaaaattttaatgaaacaagacaaattcctaaaagtacaaaatttgccagtggaggcaggaatgaataaaaatctagtcaaaaaaatctttttttgttattatactttaagttctagggtacatgtgcacaacgtgcaggtttgttacataggtatacgtgtaccatgttggtttgctgcacccattaactcgtcatttacattaggtatttctcctaatgctacccctccccctgccccccaccccacaacaagccacagtgggtgtttcccaccctgtgtccaagtgttctcattgttcgattctcacctatgagtgagaacacacagtgtttgtttttctgtccttgtgatagtttgctcagaatgatggtttccagcttcacccgtgtccctgcaaaggacgtgaactcatccttttttacggctgcatagtattccatggtgtatatgtgccacattttcttaatccagtctatcattgatggacatttggtttggttccaagtctttgctattgtgaatagtgctgcaataaacatatacatgaatgtgtctttatagtagcatgatttataatcctttgggtgtatacccagtaatgggatcactgggtcaaatggtatttctagttctagatccttaaggaatcaccacactgtcttccacaatggttgaactagtttacactcccaccaacagtgtaaaagcgctcctgtttctccacatcctctccatcatctgttgtttcctgactttttaatgatcgccattctaactggtgtgagatggtatctcattgtggttttgatttgcatttctctgatgaccagtgatgatgagcattttttcatgtgtctgttggctgcataaatgtcttcttttgagaagtgtctgctcatatcctttgcccactttttgatggggttgtttgtctttttcttgaaaatttgtttaagttctttgtagattctggatattagcactttgtcaaaaattttaatctgtaatttaaaactttcctataaagataatcccaggaatagacggctttaccaggcaattctaccaaacttttaaagaaaaactaaaatgcaaaaggctgataataacacatgtggacaaggatgtggactaactgtatttctaataaatgaatattgggaatttaaatgggtacaaccactttggaaaactggcaatttttaatagaaagcatttgcaaatgaattttgtacacatccattagaattcagtgccatattgtttttcctgcatatagtttgattcttttgctacatttttaggaagaaacccttgccataattccacctagagtactttttcacatcccacacaacttttttgaaacagcaccattttggatgtttttttcatctatctcaatgcattactattattatgtttataagctacaaaatttatatttctaattgtagtttcctgtgattagtaaattatcattacacattgttacatttctactttgtcttgaagtcattcatattaaagaattaatttcactttagaaattaaatacggctgaggtttgtttaatgaggccattaaaaggcacatgcagaaaaaaaaatagatcctgttgctgttctttctattcatggtgatggtgagcaatgaagtggtttgtataggcacaaactatgagaaaaatgtgtttttaaaatattttaatgacattttaatatatgacatgttaaaaccctctatcacatcttcacccaaaacattcaggaaaatatttattttaatatttgcatttcttgggtacatttttcatcaacataatgatccctgtttcaatgtcaggaggttaaaaataaaatatgcccacaagaagccgtcagtatcatgattactactagaaataacagtacagaaatatttcttagaaagcatcaaagcaaggatagcttgatttttaaatcctcaggcagtagtgtgaaaaccgtagaatcactcgttaaccaacagcaaattatctaggctttaaaagcaggaaatagactttttcttgctgacttttagtttacagccctgtccctacgtccagagctctttattccacaactttatcaaattctgcctttaaaaaacaatctttgttttcaaactcatcatggcccgaaattactaacactagaaataaaatcccagctgatgtcaatgttttcaaaaatgtaaagaggcttttcttagagaccctggatgaaaaatgcctattcaaagattcaggacgcttcaattgaccctctctgcaccccttatatttctcaacaattctgggaaaatctgttattaaatcaagttattttttccaattgaatctctaattaaactctttgatacaaagtcaagggtttctgcaaaaatttgtgtactcttgaaagtctctgaagtagtaaaactgtagattcatgaaattattactattattattattttaaagttatggaatttctttgtttattgtgctcatggactttccagagaattaaagtttccttcgttttaattgagagatttgtatgacaaatcaaatctcactgaccttctttgagccttcttagaaatgtgaatgatttggtagtttgatattgagaatcatatcttaccttcttaatggattattatgccttctgttgtctgaggtggacagacaaattgattgctatttggaaggattttaattttttgttttcttatttctaagagcaaatgtattctctgaagacagaaaaatatgtgaaacaatattcgttcttatcttacttgaaaatttaattaattgatgagtgaacctcaccataatatttacttgctaatcttattttaataacaggccgctaaaaagcacaaatctattcatttcaggtaataatgaatagttcactttagaatgtgtcaaggtatgtcctagttccttaaataagttcttaaaaatacattaatgaaaaacaagtcattgtttattctgaattcagtagctactgaagaaaataactgtatttggttgcgatgttcctttgttccacagtttcctgtttctgaagtgtttactttctcctttctggtcatcctacatacatccattgttaaagggccagccctggactcctccctccattcctgggtagcttgccatacacagagcagtgcattccaggactttgtactgtttggtgtaatagatttcctgagttcgtgtcttctcccttcaattggaaggcaacaacaatttattttgcttcttttatatttcctgcatcacctacaacatcctgaacattttgtctctcagaggtttacataataaaatgaataccagccaggcgcggtggctcatgccagcaatcgcagcactttgggaggccgaggcgggcggatcacgaggtcaggagatcgagaccatcctggctaacacggtgaaaccccatctctactaaaaatacaaaaaataagccggatgtgttggcgggtgcctgtagtcccagctactcgggaggctgaggccggagaatggcgtgaacccgggaggcggagcttgcagtgagccgagatcgcgccactgcactccagcctgggcgacagagtgagactccgtctcaaaaaacaaaacgaacaaagaaaatgaatacctgttgactgattgtgtgacagcaaaactcctctatgatgacaccaggatgatatgatacagtgattaaatgaatctctgtgtgtcaagagaagtactgagctcaattctaatataacgcatatagtccagtgcttgtataatatgctgcttaatatagatttcttttcaattcaactaaatttaacaagtatttactgagcacctactatgtgtcagacgctatataggtaggtaattggtagacaatagagtatagaactgacaaaaatctctgctcttataaagcttatattccatggagattagataatatctggttatatctgacagaatcattctggacaaggaaaagatcaagtgtagagaccctgcgtggagagtgttgagactagcaaggacgaggtcacagatagagcgtgagattacataaagccttatgggtgttgaagggcaaatagaagcctttggatgattctgagcagaggaataacataatatgactttaatagcacctgtaaagatactggattggatttaaagattacttgaaatttctcctataaacgaaattctgtggccctgcgactttctcttctatgtggggttcaccctaaaaaatatattaatttatgatccacataacgtgacagtctttctactcataccacatatgttttatacatgttcatcatacatatgcaaaaataagataatttccttttacatgcttacccaaagaaaactaaaacctaacttacagatattcaaatgctttatatatgccattattcttagcttcacacagaactagttctgtctcttaaacaggctgatatttaaacataggagtgtttccagagaagctctgaaagtaagccaacatgatttttttaattattattttttatgattatagacatagttattttctatgcatatgtttctaacttaaaataaaaaagcaatccttcctgtcaccaattaacatgtatgtccttgtgtacatggatatatacagagctaattacatgtgtgtgagtttattggttattgtacatatacatattatccctttatgctgagtcttcaatcaataacaatcccagtagtaacaaacatacccagagcccagatcttggtttctacataccattttttattgaaagacagcagatacagctgtttctagggttgggacaagaaaaatacaagatgagccatcagcatcttgtagtaccaaaaagtaagaaagtgcccaaaaacaaaaatatgggggtgtcgtcaaagggataaagaaacccacatgaaagatttcaattgccaaagcaacaaaaaatgtaaccaaaaaaatagataatgcattattggtttataaagcaaagaataaaataaatacacctgattccatagtggtataaataaatgattgataagcaaatagagaaggagacaaatcttctttacagaatttcaaacaatatatatagggggtggagcttaattctcataccactccctacacttgacggtgggcttagtgacttgctgccaaagagtagagtagggaatgggaaaaaggcaagttttcagtggagtaacctggtaaacgctactttatccaaatagttaaggttaacattgttagtgatttcatgtgactatcatctaacgcctgatacgatatgacaaaaatggtgctttacctcgttagtattttttaagactcataatcccaatcttatctgaaaaaacataaaacaaatacaggttgaggagcattctacaggatacctgaaaattactgctcaagactgtcaagctcttgaaaaacagactgagaaatattcacagagcagaggagaatgaggagacttggcaaccaaatgcaatgtggtacccttgattggatcctagaacccagagagggaattatggcattaaaaactgatgaaattcaagtaagtctggaatacagttaagaataatgtattaatgtaaggaaattggctgaggggtacattttgcaacccctttatgctatctttgcaactttttcgcaaatctaaaattattacaaaataaaatgttcgtttaaaaggtaaaattatgaattgccattttttattacaaagatgcttttgctagaaataaagatgattgtgtttgtttgaatcaaaatgcatggaaaatacatgaatacattctgcttagtttcttctttttcgagcactacaaaaatgagtgccgaatctctcttttcatcccttaatgtggttccttcactcccaatatgtatctgaaattagtaggaagagacaaaggaagcactggcatttttactttcataaacattaacagatgcagagtcaggaggtctttccagtcacagccggtgggtggtttcagtattttcttcccagcatggtcttacgtgaataatggtggcaaattatatatgactttattaagcacctttctctttttggaagaaaactgcttttcattacacgtaaaataataatagttatattcataatgacaccaaccatccatcacaaggaccatattccttttttaaaaaaatttactatagaaatcacctcagattatgtgttgagcttgttgcaaagtctaaatgcaacataaattgtctccagtatgacctttcacaaatgtgagtgcaaagtaaaaataaaatcctgggactaaaagcctcagctcacaatctagagaaaatttcaagtaaaaacatagattaaaatggttttgtttttttgaaaaattgataattgaaaagaaaggatgagaagtgctgctgaaatttgttggtactagaagctaagcagatttatgagacagattcaaggcatgattttttaaatcccaaataatagtaataacagtaataattgtacaaatcaagcgttggtgaaaaaatcactacaaaatttattaccatacttttaactctcaaaaattacactgttgttacttcactcatattcttgacactctgcagaaggttcttctttgaagaacctaaaatatggtatattaggggatctctgggaattgaattgctagaattatttgtgcttcctattgcttaaactgatgctgctgtgaacaattaattaaacaagttagcaaaataaattgagcctttaaatcttttctttacttggcttatatgtgttatacttttcttcggtaataaataagtagggattttgtaatgcaaattagtaaaaaatattttattgaatgccttccattcatttgactgataaaatagtggtaaatagaaatattgctcattaatgcccacacttagctataattctaatttggggatctctgagcttaaaaccaaactatacatatttggaaagaagatagcctatggccttaaaaataaacaatgtgaactgactgtcctgtgtctttttattgttattttcttgagacacgcctgttgctacaactttctttttccagctaattttcacaattgccaataaaatatctttattattttaactctaaatcaagtaagaacaacatagttttgtgcaaaaatcacagaaaattcaacatttggacatttcatcatgacctccagtgcaacttgtatgatgttaaattcatcatttactaatttccttaaaagctacaaacctgtaaacaacaccatattctatccatattctattctttaaagtgagaaatcttggcaatttttttaaatcccctttccctcaatcttttaaaaaataattaatcaccaaagttgctcatttatcttttgagatatcttttggaatcacagcttctttgccattttgtccacaatcaccatcatccagttactcacgtctagatctccaggtgaccttcctgttttcaatctctctatcagagaattcatcctgcaagaacctctattgcctaccaaactacagccaatgccttctgctagaatttcaggataatcacattgccttttacttacttttcattctagccaggttgtttttctctgtcccctggatatatcacacaattttagtttttgcttctcttgactctacctagaaatttatcttaactctcttctatttgaactctcatatcaacccttttaccattctgtctactcatacatacataaaacagaagcattatatctatatttacaaaagaaagcaacaaaaaacattttgagcttataggaaattcagggaacattgttctcaggaaattttcttatagaaattagcagagaatcaactttaatcaactaagatataaattgatacatgaatgtatcatgcacagtactgaacatgaataaaccaaggaattatatttacaggaagaaatatcagtattagaaacctgataaggccaaaatgagataataatatttagttttaaaaagagaagaagaaggtatacatagtatatgtacactgttttcctaatcttcctggctaaaaatctagagagaatttgttatcaaaaaatcaaagaatacaattacaaaatcaaagatcaataacatgatcaactaaaatcatgcagtagaaaaaaaagaaagaggaaagaagcaatgtatagtgacatcattgcttattgcagagagttcataaaccctgcctgaaatacaaaaaaacttagtgtattactaaaataagcaatcagctctggcatatttattatgaagttaatgaagcttaaactggaaggcacctcttttgcacagaccccttctactctttgctgtgactcctttcttaattctaaataatttttttcacttgcctggttacttttattttattactttctattcttttcattgaagaagttctctctaattgtgtaatctttagaactcacaaaacctgaacctacccctgattttaaagatacctcagaaaaaaaaaatagcacagtacacacacacacacacacacacacagcaaaaacaataagcaaacaaaagagtcagtaaatatataaaaagacattgcttgaaaaacaaaataaacagaataattataagaacagaattaagttgaaacacaatttttaaaaattatacatctacaactcattgaaataataacactttcatttatatcattataaatattcatctacatagtgtgtaccagagaatctcctaaaaccaactgactgagagagattaaaaaaaaatgatgggaaacatatagcaaattcaaacccaaaataaagcaggagtcacaatattaatatttcagagaaggtaaaatctaaaggaaaaagcactaaacaacataaagtgtaccactatataataatgacttaatccattcaggctgctataacaaaataacttagactgggtagatcataagcaatagaaacctatttctcagagttctagaggctggaaagctgagattaagacacagattcagtacatgatgagggccagtttcctgggtcatagatggcaccttctcactgcctccttgcatggtggaagaggctaatgagctcccttgggcctcttttataagggcaccaatcccattcatgaggacactgtccttatgatctaatcacgtcccaaaggtcctacctcttaataccatcaccttgggggttaggatgtgaacgtataaatttgggggaggggacacaaatatatccactaaagcaatgaataaggataaaatccacagtcaacacctaacagatgaatttctatgcaggaaaggatatagcatcaacaatcatactgaaactaattttaaaaacacttgaagaaagttatatgaatacattagtagtaacttttattttcctaagtgcataatagatcaagcagtcataaaatcagtacctatataaaagaccgaagtatcataattaatgagatagtaataattagtattaatttaactttgttccctgaatataaagagcaagtctagttttctggtatcctcagaacattcacattaggacacacacacgcacacacacaacccttgggctgaaaccagagtagtaagtaaatgaacagccgttattatcctgagggaaatgttgttattggaaactgaagttttgaggaaattagtggccaacccatgtgggtcttcacaagacatacagctaagcctgaaagccctgcacaaagctgggaatatctaagatactataaactcaatgagagtcttagttataacaacaaatatgcccacaaatggaaccagaaagagacctgcttgtctctgctatagccctggatggggtaagaatagtattttccacacatgataagcatagacctacctcatcaatttatactacctgaacaggtcaggaacccctcacgttgagaaatcaatttaaagttctaggttgttagcattctttggtaccagcagaggcaatttcagttcttctctggagattcttaagctactagctcaggattttccaaaattaaagctaacatctagatttaattattatcaaatgccaaatacatgtccccaaaaacccaaaagcaaaaccaaaacaaaacccaattatcatggtccaaagataatggaaccacagaaaacaatttggtatatcagatattggaataactagaaaagatattttaaaactaagtataaaatatttaaggcaataaaactgaatgagaaaaataatcatatatcaagaaactacagttgctaaaatatccaattacttatgaagaaccagaaatagagggccaaaaatataggtactaatggtaaatataggatgcatcctggcattagaaaaatttcaaaacacaaaatgataaagaaatccaactacaggactctgtaaaccagactttgtatggcaaaaacaaatcttttccctctgctgctactacacaaaagttcaatcctgctacttttcttccaagaggaattggtaatcacctatctgggagaattgccctttgaaactgcaatctaaatgctagcctttgcttactcttgacaaatttatctaaaaactgtgtaaaggtcattttaacgttaccaatgagactaatgatagacgtgtacccccttggctatagtcatggctactactacctgggatatacattttcaactttaaaaatggtttatgagtgtgttatctgtccaacagttacatctgttagcaatgtactatataaactttacagttggtagaaaaactttaataaaggcttttgtatactgagattacatgggaaaggaaaataatattttagtgttgaaggccttctgggcctcttttcttttatttctctgagtcagcagcatgtgcaggctcatgtatttgagtggttagccaaactctgccaacattttgcccaacgtgaaatgcccatgtaacaaagaatctacgtcctttttaaatttaaaacatgttggtccatgtctacagatttaaaagcaacaatacaaattgctcaaatggaaaatccttaatttaaaaatacaatcaatgcaagccacaactcctgcatacaatctttgaggaattctccccttcccagggatcacatttaatgaactggcaatagctggattctgaatgatactcccagaagtagcactgtaactacgtcttgaaacctcaagtgtttaggttggcttttcttgagatagttatctaataagtcggccgtgtatgattttctttcatctcctatcatggaagtctaatggtcagatattctgtcttcctgtttctggcagtaacactttgagcattttacctagtatggaatttgtaatcttggtgtgaccaagagctagctgtgccattgagagtctagctctgccgccttgtgtgttccaagaaagccctatccaggacagcagtgccagggtgcatcccaacccgactgctctggggatgacagtcttgctgttttcctgcaggctttccttccttgtttcttccccttgttttggtgttcccatatattgtgcaagctatcagacacccttctaatatgatcctttcaggccagactagagtcagtttctgtcacttgcaatcacgaagcctaactgatataatatctcaactaaaaagtcaactctcagttatgaagattgcatatcttttctcagccatttgttccaggcaatccaagtgaatttactgtatgtaggtaccatttctctttatcctcatcacttccagcagtctcatttctgaatttgtatatcaataaggagagtgcaaaattaaattagtctaacatctgcctagcttctctttttcattgttgtgcagtatatatacattgttgtgaagtacatagtacaacggatatgggcaaaaccagagatagcagttattaggtttaaatccgttatctagtgttctgtgaatgtatttctctggggcaaaataaaaaatatttggaatagtttcactctgaagtcagctgcttcagaaattgcagactgtgtcagattgaactctcaaaggaaaatatgaagcacagaaacaatggtaaatgacaagtaatagaaaaagttgtatacattcagtagaagtaaataaactttaacgttttccagataagatttaactttttaaaaagtgtttacttggtgtgaagcattgtgtcaagtgattccagtcagggtttctcaaactcagttctggtgacaagtggcgtgggagaaaactttcttacgggagctttcctatgcattttaggactgccggcagcatccttggcctctatccattagatgccagtggcacacagacagacacaccatttacaataaacaaaagtgttttcaggcatggccaatgtcaccttggctgggagttgtggggtgtggcggggaatcacctcttgttgagaaccactatttagatgacgtagttatttaaccttcaaaacaaacccatgagacagggatgatcattatcttttacttgtaaaagagttatcattacccttttacaggcaaagaaaaggagacacaaatatgtttcattagtcaaccacaaaaacagctagtaagtggaaaagctgagattcaaacctaggcagtctgactccagaatttttgttcacattgtttgtctgtggcacccaaaatggttgggctcaagggagaattaaatccaaagatttattaaatttatccaaatatacaattcaaaaaaacctcatacattctgcttaaatactctgatttttttttcaggaacccctttaaatattcagtgccagggaaaaattcacaatacttaagctcatatttaagtcattgttcctggattttagatatgcttaaaagaagcctgggtaggaaaaagatatggaaatatgacttttaaaagtaaacattagtatcttctaaagttaaactaatagcacatagacagttcccatccctcctttaaacatgctatagatctgagctatgagccgactcagtcccatcccgtacaagcccacttcacattcaagtccatgcttgtctccagacagctcaggtagaaccaaagtagcccttgggttttggcttaaagcagtctgagtgggagcacctacagagcttatgggagacaaactttgaatctatggtattttcatttattttttaaattttcaaaaggcttggttttcccccttaccccctccttcaaaagcataggctgtaggtacaaaaagggagtgaaatatggagaaaagggaaatgtgggaagagaaagaaggtcaggaaaagaaattttttactcagaagcatttttttccctttagaatgtgtttaaatttgtaagtatgatttttaactgaaagttgaaaattataacttgagtcagcagagtaattacctacattgtgtcaggaattctgcttctaggaaacaaatgaattcataaaatgtcacttttcttcctagacacacaaaaatttatacctgcaaccttaatatattgaaacatacaacttgcagacatactgtgtaagtgtgtaactttctaacttggctaggacagaggagcaagctggatggaaattgagctgttcttgcaaatttcggagaactagttcatcagagatggaaattccaaacagcatgctgaggctaaatggaattgaggggctatggattcaatgcagaccataattgagttttatttgccctttcaaggacttatgcaaagctttattcccttagcacagtacacacaaggtgacatttttcagcagtctgacttttcaattatggatcttttggaaagctaatgatgtcaatattgttaatactgccaacattgtgtcagtacattgaagaacctgtgatattaaatatgctgatgtaaaaatatatgttatttctgctcagccgtgtgcaaacaatctggctgaagtgctagaattatagggaaatcctctccagagataaaagcagaatggaattcggttgagagcagttaaaaagctctcttgttttaagtggtttcctgaagtactgaggccaaaattttagaagctaattgcatggagtctctcactcaagacttctggttaaagttagaatactcttaccatgttatttgtactttaggggatggggagagcatcataatgtctaaagttttaaaaaatttatacaaatagaatttttgagtaaatgattgatgatattaaaaggtttaagagaataacaactcttcaggcagcaaagggtctaagaccaaatattttccatcacacaattactataacaaagccaggatcatattcttcacagtaaaccctcatttattagttatgagcattggtgatttttcagtgtgatgggttccagatgtctaaatacagtgacaacccattgataaaaggaattatagtgaccgcagtaacaaaagcacattctccttaaaagtaaaaggaataacaaatgtgatatttaattacatatttaagatattacccttccagattcttttctccatatttttattacttatttcaaaatctctcgcctactatatctcttctagacaataaattctaacaatgattttatttctcatgtatgaaaatgtctatctgatatttccagagaataaaacctttttggcatggaattaaaatgcatgctaaacttaagaaaaatttcatttgctggtaatgtccaaatgaaacaaagtatttggtgttgaataggaaatctgtagtggtaacaactaacaatagggcagaaaggtttttattataaaggaaacccaagaaataacttcttggagtagtatactcctactatcttagaatagtaatattctagtattattttagaggtagttaagaaaagtatgtgtcaagaactacataaacattattccataggccatcactataatataaatgttagaatacattatctgagactattatttaatataatctttgtcatgtttcagtaaataacttcacttatattacaatataaaaataattaatattgcctttcaatctatataaattttaaggtgatcatctcacatataaatttcatataataatgataataagtgtttataaaataaaataaaaataagcatgaattaggaaaaggagacttttctctaggttaagttctgtgttatttgtatttgttgatcctcttgtacatattttgcagcgaaagtgagttttatgatgtttaaaatgatggtggaaaagtgaagaataagcacccatctatataaagaaagacttaaaattgatcattgtatagcaaaattcaaaatgagtattacctttaaaagtaacttgtaatgatagaatatttttatactaggttgaaaacaatacttatcttttttttttttaactacaaaaatgagaagggtgataagtaattcaggtcctcgagcaaaaagcaatataaaagttttgacatagaaatatttttgtaggagggagattttggaagaaaggggcagatgcacatgaaattatggtttaaaactttgctaatcctcaaacttaaaagtgattcaactttaggaatagccaaaaatctagtaaatatttgagcacactaactgggtaaatttttatcctcttttattttgttgttaatgggtgatgagactaatactaatttttgcatgatttataaagtgctgctaaatatgactctagatgactccagaaagtatttgaagtcataacataaagtgaatttcctctttgaataatttgtctcttttgaatcagttttctgttgctgtgtaataaattccacaaatttagcagcatgcaacagtatccacttattagttcatggttctgtagttcagaaataaggacatggcatcatcagttctctgctgagatctcagaatactaaaaatcaaggtgtcatctggtgatatgagttggctgtgtccccacccaaatctcatcttgaattgtggctcccataattcccttgtgttgtgggagggacccagtgggaggtaattaaattatagaagagggtttttctcatgctgttctcatgatagtgaataactctcacgagatctgatggtcttataaagggcagttcccctgcacatgctctcttgcctgctgccgtgcaagtcgttctttgctcctcctttgtcctccaccatgattgtgaggcctccccagccctgtggaactgtgagtcgattaaacctccttttctttataaattacccagtctcaggtatatctttcagcagtgtgggaataaactaatacatctgggctgaatttttttatggagcttgaaatctttttctaaacatacatgttttgggcaagttttagttccatgcagttatagcacttaggtccctgtttccagctctcagccagaggccactctcagctccttgccaagtggcacctccaagttcaaagccagcagcatagtatttctttttcatccaatcaccctcaccttcaaatctccttggccaagaatacagccaagtggattccctgattaggttcatccctctcaagataatcttcccatattaaggtcaaatggtttggaatcttaattacatttgcaaaatccctttggcatataacacatcatcagtgaagtgatatctaatcatattcacagtttccacccacacatatgggtaagagattacacaaaggagagggtcattaaagtcattttgaaattctggctgccacaaccctcctaactgagctttccacttccttcaacctctaatctgctgccaaatagtttttttttcctaaatgcaattatgaagaagttattcaataccaccatcactatcatctgtaccattaatgtttaaagtattttgttggttttcacttgttcattcttatgatagcacatttgggtattgtttcttcaaatattttctgcctctcaaatcttcatacacagtgctctaactccatttacctagttttagtaccttttgaagacctatttcccctccagactcccttatccttagagtttgtatttctccaaacctactgcctgtctctcaacttccgcttgtttctttaggttcattaagattcagcttggaaatcatatctttcaaggacattttctagtacctttccccatccttagccccttcattttagagagatgccttgtctctgcaatctcagataacttgcatgattctcctaacttcactctgtattttaattgcctgctgtttgctttactccactggattgtgaccctgttgaggaagaaagtttctaaagtttcttccatatctcatttatggtgtttctgatgtccaaaatagttcctgtgaccagaaaagaaaattgttaaaattcatgaaactctgacactttctaattttgagaccatttctgtaaatgacaaataatttgacttttctgtattctggt
